(19) United States
(12) Patent Application Publication
(10) Pub. No.: US 2023/0218733 A1
(43) Pub. Date: Jul. 13, 2023

(54) RAPID VACCINE PLATFORM

(71) Applicant: CYTONUS THERAPEUTICS, INC., Columbus, OH (US)

(72) Inventors: Remo MOOMIAIE, Columbus, OH (US); Richard KLEMKE, Columbus, OH (US)

(21) Appl. No.: 18/190,838

(22) Filed: Mar. 27, 2023

Related U.S. Application Data
(63) Continuation of application No. 17/885,867, filed on Aug. 11, 2022.
Application No. 17/885,867 is a continuation of application No. PCT/US2021/017506, filed on Feb. 10, 2021.
(60) Provisional application No. 62/975,044, filed on Feb. 11, 2020.
(60) Provisional application No. 63/014,002, filed on Apr. 22, 2020.

(51) Int. Cl. A61K 39/00; C12N 5/0775; C12N 15/88; A61K 35/761; A61K 35/763; A61K 35/768; A61P 35/00

(52) U.S. Cl. CPC A61K 39/0011; C12N 5/0662; C12N 15/88; A61K 35/761; A61K 35/763; A61K 35/768; A61P 35/00; C12N 2770/20022; C12N 2770/20034; C12N 2770/20061; C12N 2770/20071; C12N 2710/16622; C12N 2710/16632; C12N 2710/16671; A61K 2039/5156; A61K 2039/5256

(57) ABSTRACT

Provided are methods of making and delivering vaccine compositions using an enucleated cell-based platform. Methods of clearing pathogenic infections in a subject using the enucleated cell-based platform is also provided. Such enucleated cell-based platform reduces the vaccine development timeline as compared with conventional biological vaccines, and improves vaccine efficacy.

### CROSS REFERENCE

[0001] This application is a continuation of U.S. patent application Ser. No. 17/885,867, filed on Aug. 11, 2022, which is a continuation of PCT Application No. PCT/US2021/017506 filed on Feb. 10, 2021, which claims the benefit of U.S. Provisional Application Ser. No. 62/975,044 filed on Feb. 11, 2020, and U.S. Provisional Application Ser. No. 63/014,002 filed on Apr. 2, 2020, each of which is hereby incorporated by reference in its entirety.

### SEQUENCE LISTING

[0002] The instant application contains a Sequence Listing which has been submitted electronically in XML format and is hereby incorporated by reference in its entirety. Said XML copy, created on Oct. 5, 2022, is named 53712-706_302_SL.xml and is 1,091,372 bytes in size.

### BACKGROUND

[0003] The severe acute respiratory syndrome coronavirus 2 (SARS-CoV-2) pandemic and its attendant morbidity and mortality underscores a need for safe and efficacious vaccines that induce protective and durable immune responses. The pandemic also revealed severe shortcomings in the conventional vaccine development pipelines around the world to address urgent medical needs, such as the widespread transmission of Coronavirus disease 2019 (COVID-19). There exists an urgent and unmet need for a new vaccine development platform that can improve time-to-market for safe and efficacious vaccines and therapeutic agents to treat diseases or conditions caused by rapidly evolving pathogens, such as SARS-CoV-2.

### SUMMARY

[0004] Described herein, in some embodiments, is a cell without a nucleus, the cell without the nucleus comprising: one or more intracellular organelles for synthesis or secretion of a vaccine against a pathogen in absence of the nucleus. In some embodiments, the pathogen is a virus. In some embodiments, the virus is a coronavirus. In some embodiments, the coronavirus is a severe acute respiratory syndrome (SARS) coronavirus. In some embodiments, the SARS coronavirus is severe acute respiratory syndrome coronavirus 2 (SARS-CoV-2). In some embodiments, the virus is an oncolytic virus. In some embodiments, the pathogen is a bacterium. In some embodiments, the bacterium is Bacillus anthracis, Yersinia pestis, Francisella tularensis, Brucella, salmonella, Escherichia coli O157:H7, Shigella, Burkholderia mallei, Burkholderia pseudomallei, Chlamydia psittaci, Coxiella burnetii, Rickettsia prowazekii, Vibrio cholerae, or Cryptosporidium parvum, or any combination thereof. In some embodiments, the pathogen is a toxin. In some embodiments, the toxin is Clostridium botulinumoxin, epsilon toxin of Clostridium perfringens, Staphylococcal enterotoxin B, or Ricin toxin from Ricinus communis, or any combination thereof. In some embodiments, the one or more intracellular organelles is an endoplasmic reticulum or a Golgi apparatus. In some embodiments, the vaccine is coupled to a surface of the cell without the nucleus. In some embodiments, the vaccine comprises a transmembrane domain that couples the vaccine to the surface of the cell without the nucleus. In some embodiments, the cell without the nucleus further comprises an immune-modulator comprising granulocyte-macrophage colony-stimulating factor. In some embodiments, the cell without the nucleus further comprises a homing receptor comprising: (a) Leukosialin; (b) L-selectin, lymphocyte function-associated antigen 1; (c) very late antigen-4; a portion of any one of (a) to (c); or any combination of (a) to (d). In some embodiments, the cell without the nucleus has a diameter that is between about 1 micrometers (μm) to 100 μm. In some embodiments, the diameter is about 8 μm. In some embodiments, the cell without the nucleus is viable following cryohibernation for at least 24 hours. In some embodiments, the cell without the nucleus is viable following cryohibernation for at least 48 hours. In some embodiments, the cell without the nucleus is viable following cryopreservation for at least 24 hours. In some embodiments, the cell without the nucleus is viable following lyophilization for at least 24 hours. In some embodiments, the cell without the nucleus is cryopreserved, cryohybernated, or lyophilized. In some embodiments, the cell without a nucleus is isolated or purified. In some embodiments, viability is measured using Trypan blue dye exclusion as described herein. In some embodiments, the Trypan blue dye exclusion is performed by: (a) centrifuging an aliquot of a plurality of the cell without the nucleus in a suspension to create a cell pellet; (b) resuspending the cell pellet in serum-free medium to produce a serum-free cell suspension; (c) mixing 1 part Trypan blue dye and 1 part of the serum-free cell suspension; (d) counting the plurality of the cells without the nucleus within 3-5 minutes of (c), wherein at least some of the plurality of cells without the nucleus are unstained with the Trypan blue dye, which is indicative of viability. In some embodiments, viability is measured using Annexin-5 cell surface staining as described herein. In some embodiments, the cell without the nucleus is not a red blood cell or a red blood cell precursor.

[0005] Described herein, in some embodiments, is a pharmaceutical formulation comprising: the cell without the nucleus or a plurality of the cell without the nucleus described herein; and a pharmaceutically acceptable: excipient, diluent, or carrier.

[0006] Described herein, in some embodiments, is a method of producing a vaccine, the method comprising: (a) removing a nucleus from a cell to produce an enucleated cell comprising one or more intracellular organelles for synthesis or secretion of a vaccine against a pathogen; and (b) introducing an exogenous mRNA encoding the vaccine to the enucleated cell, wherein the enucleated cell expresses the vaccine in absence of the nucleus. In some embodiments, the pathogen is a virus. In some embodiments, the virus is a coronavirus. In some embodiments, the coronavirus is a severe acute respiratory syndrome (SARS) coronavirus. In some embodiments, the SARS coronavirus is severe acute respiratory syndrome coronavirus 2 (SARS-CoV-2). In some embodiments, the virus is an oncolytic virus. In some embodiments, the pathogen is a bacterium. In some embodiments, the bacterium is Bacillus anthracis, Yersinia pestis, Francisella tularensis, Brucella, salmonella, Escherichia coli O157:H7, Shigella, Burkholderia mallei, Burkholderia pseudomallei, Chlamydia psittaci, Coxiella burnetii, Rickettsia prowazekii, Vibrio cholerae, or Cryptosporidium parvum, or any combination thereof. In some embodiments, the pathogen is a toxin. In some embodiments, the toxin is Clostridium botulinum toxin, epsilon toxin of Clostridium perfringens, Staphylococcal enterotoxin B, or Ricin toxin from Ricinus communis, or any combination thereof. In some embodiments, the enucleated cell was stored at or below 4° C. to reversibly slow or stop biological activity of enucleated cell, and subsequently thawed prior to introducing in (b). In some embodiments, the cell without the nucleus was lyophilized and subsequently rehydrated prior to introducing in (b). In some embodiments, the enucleated cell was stored at or below −120° C. to reversibly slow or stop biological activity of enucleated cell, and subsequently thawed prior to introducing in (b). In some embodiments, the removing the nucleus from the cell in (a) is performed without differentiation of the cell. In some embodiments, the one or more intracellular organelles is an endoplasmic reticulum or a Golgi apparatus. In some embodiments, the cell without the nucleus has a diameter that is between about 1 micrometers (μm) to 100 μm. In some embodiments, the diameter is about 8 μm. In some embodiments, the method further comprises introducing to the cell prior to removing the nucleus in (a) an exogenous nucleic acid molecule with a nucleic acid sequence encoding an immune-modulator comprising granulocyte-macrophage colony-stimulating factor. In some embodiments, the method further comprises introducing to the cell prior to removing the nucleus in (a) an exogenous nucleic acid molecule with a nucleic acid sequence encoding a homing receptor comprising: Leukosialin; L-selectin, lymphocyte function-associated antigen 1; very late antigen-4; C-X-C chemokine receptor type 3; CD44 antigen; C-C chemokine receptor type 7; a portion of any one of the homing receptor thereof; or any combination of any one of the homing receptor thereof. In some embodiments, the method further comprises introducing to the cell without the nucleus an exogenous mRNA molecule comprising a sequence encoding an immune-modulator comprising granulocyte-macrophage colony-stimulating factor. In some embodiments, the method further comprises introducing to the cell without the nucleus an exogenous mRNA molecule comprising a sequence encoding a homing receptor comprising: Leukosialin; L-selectin, lymphocyte function-associated antigen 1; very late antigen-4; C-X-C chemokine receptor type 3; CD44 antigen; C-C chemokine receptor type 7; a portion of any one of the homing receptor thereof; or any combination of any one of the homing receptor thereof. In some embodiments, the cell without the nucleus is not a red blood cell or a red blood cell precursor.

[0007] Described herein, in some embodiments, is a method of delivering a vaccine against severe acute respiratory syndrome coronavirus 2 (SARS-CoV-2) to a subject, the method comprising: administering to the subject a cell without a nucleus comprising one or more intracellular organelles for synthesis or secretion of the vaccine against SARS-CoV-2 in absence of the nucleus. In some embodiments, the one or more intracellular organelles is an endoplasmic reticulum or a Golgi apparatus. In some embodiments, the cell without the nucleus further comprises an immune-modulator comprising granulocyte-macrophage colony-stimulating factor. In some embodiments, the cell without the nucleus further comprises a homing receptor comprising: Leukosialin; L-selectin, lymphocyte function-associated antigen 1; very late antigen-4; C-X-C chemokine receptor type 3; CD44 antigen; C-C chemokine receptor type 7; a portion of any one of the homing receptor thereof; or any combination of any one of the homing receptor thereof. In some embodiments, the cell without the nucleus has a diameter that is between about 1 micrometers (μm) to 100 μm. In some embodiments, the diameter is about 8 μm. In some embodiments, administrating comprises systemic administration. In some embodiments, the cell without the nucleus is administered in a dosage amount of between about 10³ cells/kg body weight to about 10¹² cells/kg body weight. In some embodiments, the cell without the nucleus is administered to the subject twice within at least an hour, 2 hours, 4 hours, 6 hours, 8 hours, 12 hours, 1 day, 2 days, a week, 2 weeks, 3 weeks, a month, 2 months, 3 months, 4 months, 5 months, 6 months, 7 months, 8 months, 9 months, 10 months, 11 months, a year, 2 years, 3 years, or 4 years. In some embodiments, the subject is human. In some embodiments, the method further comprises administering an adjuvant. In some embodiments, the cell without the nucleus is not a red blood cell or a red blood cell precursor.

[0008] Described herein, in some embodiments, is a kit comprising: a plurality of cells substantially free of nuclei, wherein at least one cell without a nucleus of the plurality comprises one or more intracellular organelles for synthesis or secretion of a vaccine against a pathogen in absence of the nucleus; and instructions for administering the plurality of cells substantially free of nuclei to a subject. In some embodiments, the plurality of cells substantially free of nuclei are cryopreserved, cryo-hibernated, or lyophilized. In some embodiments, the kit further comprises instructions for restoring biological activity of the plurality of cells substantially free of nuclei prior to administering the plurality of cells substantially free of nuclei to the subject. In some embodiments, the kit further comprises instructions for introducing an exogenous mRNA encoding the vaccine to the enucleated cell.

[0009] Described herein, in some embodiments, is a cell without a nucleus, the cell without the nucleus comprising: one or more intracellular organelles for synthesis of a receptor for a pathogen antigen or a pathogen antigen-binding fragment thereof in absence of the nucleus, wherein the receptor or an expression level of the receptor is exogenous to the cell without the nucleus. In some embodiments, the one or more intracellular organelles is an endoplasmic reticulum or a Golgi apparatus. In some embodiments, the receptor for the pathogen antigen or the pathogen antigen-binding fragment thereof is coupled to a surface of the cell without the nucleus. In some embodiments, the receptor for the pathogen antigen or the pathogen antigen-binding fragment thereof comprises a transmembrane domain within a cell membrane of the cell without the nucleus. In some embodiments, the cell without the nucleus further comprises an exogenous mRNA molecule having a sequence encoding an immune-modulator comprising granulocyte-macrophage colony-stimulating factor, or a portion thereof. In some embodiments, the cell without the nucleus has a diameter that is between about 1 micrometers (μm) to 100 μm. In some embodiments, the diameter is about 8 μm. In some embodiments, the cell without the nucleus is viable following cryohibernation for at least 24 hours. In some embodiments, the cell without the nucleus is viable following cryohibernation for at least 48 hours. In some embodiments, the cell without the nucleus is viable following cryopreservation for at least 24 hours. In some embodiments, the cell without the nucleus is viable following lyophilization for at least 24 hours. In some embodiments, the cell without the nucleus is cryopreserved, cryohybernated, or lyophilized. In some embodiments, the cell without a nucleus is isolated or purified. In some embodiments, viability is measured using Trypan blue dye exclusion as described herein. In some embodiments, the Trypan blue dye exclusion is performed by: (a) centrifuging an aliquot of a plurality of the cell without the nucleus in a suspension to create a cell pellet; (b) resuspending the cell pellet in serum-free medium to produce a serum-free cell suspension; (c) mixing 1 part Trypan blue dye and 1 part of the serum-free cell suspension; (d) counting the plurality of the cells without the nucleus within 3-5 minutes of (c), wherein at least some of the plurality of cells without the nucleus are unstained with the Trypan blue dye, which is indicative of viability. In some embodiments, viability is measured using Annexin-5 cell surface staining as described herein. In some embodiments, the cell without a nucleus is isolated or purified. In some embodiments, the cell further comprises a neutralizing antibody that blocks binding between the pathogen antigen and its natural receptor produced by a host cell. In some embodiments, the neutralizing antibody is synthesized by the one or more intracellular organelles of the cell without the nucleus. In some embodiments, the cell further comprises: a homing receptor comprising: Leukosialin; L-selectin, lymphocyte function-associated antigen 1; very late antigen-4; C-X-C chemokine receptor type 3; CD44 antigen; C-C chemokine receptor type 7; a portion of any one of the homing receptor thereof; or any combination of any one of the homing receptor thereof. In some embodiments, the pathogen is a virus. In some embodiments, the virus is a coronavirus. In some embodiments, the coronavirus is a severe acute respiratory syndrome (SARS) coronavirus. In some embodiments, the SARS coronavirus is severe acute respiratory syndrome coronavirus 2 (SARS-CoV-2). In some embodiments, the virus is an oncolytic virus. In some embodiments, the pathogen is a bacterium. In some embodiments, the bacterium is Bacillus anthracis, Yersinia pestis, Francisella tularensis, Brucella, salmonella, Escherichia coli O157:H7, Shigella, Burkholderia mallei, Burkholderia pseudomallei, Chlamydia psittaci, Coxiella burnetii, Rickettsia prowazekii, Vibrio cholerae, or Cryptosporidium parvum, or any combination thereof. In some embodiments, the pathogen is a toxin. In some embodiments, the toxin is Clostridium botulinum toxin, epsilon toxin of Clostridium perfringens, Staphylococcal enterotoxin B, or Ricin toxin from Ricinus communis, or any combination thereof. In some embodiments, the vaccine is a vaccine described herein. In some embodiments, the cell without the nucleus is not a red blood cell or a red blood cell precursor.

[0010] Described herein, in some embodiments, is a method of reducing an infection by a pathogen in a subject or a method of reducing a pathogen in the process of infecting a subject, the method comprising: administering to a subject the cell without the nucleus described herein or the pharmaceutical formulation described herein, thereby trapping a pathogen having the pathogen antigen in the cell and preventing the pathogen from propagating within the cell. In some embodiments, the pathogen is cleared from the subject in fewer than or equal to about 14 days following administration. In some embodiments, the cell without the nucleus releases a neutralizing antibody or nanobody, thereby blocking binding between the pathogen antigen of the pathogen and its natural receptor produced by a host cell. In some embodiments, the administrating comprises systemic administration. In some embodiments, the cell without the nucleus is administered in a dosage amount of between about 10³ cells/kg body weight to about 10¹² cells/kg body weight. In some embodiments, the cell without the nucleus is administered to the subject twice within at least an hour, 2 hours, 4 hours, 6 hours, 8 hours, 12 hours, 1 day, 2 days, a week, 2 weeks, 3 weeks, a month, 2 months, 3 months, 4 months, 5 months, 6 months, 7 months, 8 months, 9 months, 10 months, 11 months, a year, 2 years, 3 years, or 4 years. In some embodiments, the pathogen is a virus. In some embodiments, the virus is a coronavirus. In some embodiments, the coronavirus is a severe acute respiratory syndrome (SARS) coronavirus. In some embodiments, the SARS coronavirus is severe acute respiratory syndrome coronavirus 2 (SARS-CoV-2). In some embodiments, the virus is an oncolytic virus. In some embodiments, the pathogen is a bacterium. In some embodiments, the bacterium is Bacillus anthracis, Yersinia pestis, Francisella tularensis, Brucella, salmonella, Escherichia coli O 157:H7, Shigella, Burkholderia mallei, Burkholderia pseudomallei, Chlamydia psittaci, Coxiella burnetii, Rickettsia prowazekii, Vibrio cholerae, or Cryptosporidium parvum, or any combination thereof. In some embodiments, the pathogen is a toxin. In some embodiments, the toxin is Clostridium botulinum toxin, epsilon toxin of Clostridium perfringens, Staphylococcal enterotoxin B, or Ricin toxin from Ricinus communis, or any combination thereof. In some embodiments, the vaccine is a vaccine described herein. In some embodiments, the cell without the nucleus further comprises an immune-modulator comprising granulocyte-macrophage colony-stimulating factor. In some embodiments, the cell without the nucleus further comprises a homing receptor that is specific to a ligand expressed on one or more cells in lymph tissue. In some embodiments, the homing receptor comprises C-X-C chemokine receptor type 3, leukosialin, CD44 antigen, C-C chemokine receptor type 7, L-selectin, lymphocyte function-associated antigen 1, or very late antigen-4, or a combination thereof. In some embodiments, the cell without the nucleus has a diameter that is between about 1 micrometers (μm) to 100 μm. In some embodiments, the cell without the nucleus has a diameter that is about 8 μm. In some embodiments, the cell without the nucleus is viable following cryohibernation for at least 24 hours. In some embodiments, the cell without the nucleus is viable following cryohibernation for at least 48 hours. In some embodiments, the cell without the nucleus is viable following cryopreservation for at least 24 hours. In some embodiments, the cell without the nucleus is viable following lyophilization for at least 24 hours. In some embodiments, the cell without the nucleus is cryopreserved, cryohybernated, or lyophilized. In some embodiments, the cell without a nucleus is isolated or purified. In some embodiments, viability is measured using Trypan blue dye exclusion as described herein. In some embodiments, the Trypan blue dye exclusion is performed by: (a) centrifuging an aliquot of a plurality of the cell without the nucleus in a suspension to create a cell pellet; (b) resuspending the cell pellet in serum-free medium to produce a serum-free cell suspension; (c) mixing 1 part Trypan blue dye and 1 part of the serum-free cell suspension; (d) counting the plurality of the cells without the nucleus within 3-5 minutes of (c), wherein at least some of the plurality of cells without the nucleus are unstained with the Trypan blue dye, which is indicative of viability. In some embodiments, viability is measured using Annexin-5 cell surface staining as described herein. In some embodiments, the cell without the nucleus is not a red blood cell or a red blood cell precursor.

[0011] Aspects disclosed herein provide a cell without a nucleus, the cell comprising: one or more intracellular organelles for synthesis or secretion, in absence of the nucleus, of a vaccine against a virus encoded by a sequence with a sequence identity that is greater than or equal to about 80%, 81%, 82%, 83%, 84%, 85%, 86%, 87% 88%, 89% 90%, 91%, 92%, 93%, 94%, 95%, 96%, 97%, 98%, 99% to one or more of SEQ ID NOs: 1, 301-347, or 501-512. In some embodiments, the cell without the nucleus is not a red blood cell or a red blood cell precursor. In some embodiments, the cell without the nucleus is derived from a nucleated parent cell to which the one or more intracellular organelles is endogenous. In some embodiments, the virus is a coronavirus. In some embodiments, the vaccine composition is a DNA, a RNA, an antigenic peptide, an attenuated live virus, or an inactivated virus, or a combination thereof. In some embodiments, the antigenic peptide comprises an amino acid sequence having a sequence identity that is greater than or equal to about 80%, 81%, 82%, 83%, 84%, 85%, 86%, 87% 88%, 89% 90%, 91%, 92%, 93%, 94%, 95%, 96%, 97%, 98%, 99% to one or more of SEQ ID NOs: 2, 3-7, 151-154, 251-260, 401-447, 551-562, 651-660, 751-761, 851-859, 951-984, 1051-1057, or 1151-1153. In some embodiments, the antigenic peptide comprises an amino acid sequence having a sequence identity that is greater than or equal to about 80%, 81%, 82%, 83%, 84%, 85%, 86%, 87% 88%, 89% 90%, 91%, 92%, 93%, 94%, 95%, 96%, 97%, 98%, 99% to one or more of SEQ ID NOs: 2, 8, 401-447 or 551-562. In some embodiments, the antigenic peptide is encoded from a nucleic acid sequence having a sequence identity that is greater than or equal to about 80%,81%, 82%, 83%, 84%, 85%, 86%, 87% 88%, 89% 90%, 91%, 92%, 93%, 94%, 95%, 96%, 97%, 98%, 99% to one or more of SEQ ID NOs: 101-104, 201-209, 301-347, 501-512, 601-610, 701-711, 801-809, 901-934, 1001-1007, or 1101-1103. In some embodiments, the antigenic peptide further comprises an amino acid sequence encoding albumin, or a portion thereof. In some embodiments, the vaccine is coupled to a surface of the cell. In some embodiments, the vaccine is secretory. In some embodiments, the cell without the nucleus further comprises an immune-modulator comprising granulocyte-macrophage colony-stimulating factor. In some embodiments, the cell without the nucleus further comprises a homing receptor that is specific to a ligand expressed on one or more cells in lymph tissue. In some embodiments, the homing receptor comprises C-X-C chemokine receptor type 3, leukosialin, CD44 antigen, C-C chemokine receptor type 7, L-selectin, lymphocyte function-associated antigen 1, or very late antigen-4, or a combination thereof. In some embodiments, the cell without the nucleus has a diameter that is between about 1 micrometers (μm) to 100 μm. In some embodiments, the cell without the nucleus has a diameter that is about 8 μm. In some embodiments, the cell without the nucleus is viable following cryohibernation for at least 24 hours. In some embodiments, the cell without the nucleus is viable following cryopreservation for at least 24 hours. In some embodiments, the cell without the nucleus is viable following cryohibernation for at least 48 hours. In some embodiments, the cell without the nucleus is viable following cryopreservation for at least 48 hours. In some embodiments, the cell without the nucleus is viable following lyophilization for at least 24 hours. In some embodiments, viability is measured using Trypan blue dye exclusion as described herein. In some embodiments, the Trypan blue dye exclusion is performed by: (a) centrifuging an aliquot of a plurality of the cell without the nucleus in a suspension to create a cell pellet; (b) resuspending the cell pellet in serum-free medium to produce a serum-free cell suspension; (c) mixing 1 part Trypan blue dye and 1 part of the serum-free cell suspension; (d) counting the plurality of the cells without the nucleus within 3-5 minutes of (c), wherein at least some of the plurality of cells without the nucleus are unstained with the Trypan blue dye, which is indicative of viability. In some embodiments, viability is measured using Annexin-5 cell surface staining as described herein. In some embodiments, the cell without the nucleus is cryopreserved, cryohybernated, or lyophilized. In some embodiments, synthesis or secretion of the vaccine in the absence of the nucleus is performed by the cell without the nucleus for greater than or equal to about 3 days. In some embodiments, the cell without the nucleus is in a pharmaceutically acceptable carrier. In some embodiments, the cell without the nucleus is in a dosage of between about 10³ cells/kg body weight to about 10¹² cells/kg body weight. In some embodiments, the cell without the nucleus is in a dosage of between at least or about 10³, 10⁴, 10⁵, 10⁶, 10⁷, 10⁸, 10⁹, 10¹⁰,10¹¹, 10¹²cells/kg body. In some embodiments, the cell without the nucleus is in a dosage of between at most or about 10³, 10⁴, 10⁵, 10⁶, 10⁷, 10⁸, 10⁹, 10¹⁰, 10¹¹, 10¹² cells/kg body. In some embodiments, the cell without the nucleus is isolated and purified.

[0012] Aspects disclosed herein provide a cell without a nucleus, the cell comprising: one or more intracellular organelles for synthesis or secretion of a vaccine against a bacteria or a toxin in absence of the nucleus. In some embodiments, the cell without the nucleus is not a red blood cell or a red blood cell precursor. In some embodiments, the cell without the nucleus is derived from a nucleated parent cell to which the one or more intracellular organelles is endogenous. In some embodiments, the toxin is Clostridium botulinum toxin, epsilon toxin of Clostridium perfringens, Staphylococcal enterotoxin B, or Ricin toxin from Ricinus communis, or any combination thereof. In some embodiments, the bacterium is Bacillus anthracis, Yersinia pestis, Francisella tularensis, Brucella, salmonella, Escherichia coli O 157:H7, Shigella, Burkholderia mallei, Burkholderia pseudomallei, Chlamydia psittaci, Coxiella burnetii, Rickettsia prowazekii, Vibrio cholerae, or Cryptosporidium parvum, or any combination thereof. In some embodiments, the vaccine is coupled to a surface of the cell. In some embodiments, the vaccine is secretory. In some embodiments, the cell without the nucleus further comprises an immune-modulator comprising granulocyte-macrophage colony-stimulating factor. In some embodiments, the cell without the nucleus further comprises a homing receptor that is specific to a ligand expressed on one or more cells in lymph tissue. In some embodiments, the homing receptor comprises C-X-C chemokine receptor type 3, leukosialin, CD44 antigen, C-C chemokine receptor type 7, L-selectin, lymphocyte function-associated antigen 1, or very late antigen-4, or a combination thereof. In some embodiments, the cell without the nucleus has a diameter that is between about 1 micrometers (μm) to 100 μm. In some embodiments, the cell without the nucleus has a diameter that is about 8 μm. In some embodiments, the cell without the nucleus is viable following cryohibernation for at least 24 hours. In some embodiments, the cell without the nucleus is viable following cryopreservation for at least 24 hours. In some embodiments, the cell without the nucleus is viable following cryohibernation for at least 48 hours. In some embodiments, the cell without the nucleus is viable following cryopreservation for at least 48 hours. In some embodiments, the cell without the nucleus is viable following lyophilization for at least 24 hours. In some embodiments, the cell without the nucleus is cryopreserved, cryohybernated, or lyophilized. In some embodiments, the cell without a nucleus is isolated or purified. In some embodiments, viability is measured using Trypan blue dye exclusion as described herein. In some embodiments, the Trypan blue dye exclusion is performed by: (a) centrifuging an aliquot of a plurality of the cell without the nucleus in a suspension to create a cell pellet; (b) resuspending the cell pellet in serum-free medium to produce a serum-free cell suspension; (c) mixing 1 part Trypan blue dye and 1 part of the serum-free cell suspension; (d) counting the plurality of the cells without the nucleus within 3-5 minutes of (c), wherein at least some of the plurality of cells without the nucleus are unstained with the Trypan blue dye, which is indicative of viability. In some embodiments, viability is measured using Annexin-5 cell surface staining as described herein. In some embodiments, the cell without the nucleus is cryopreserved, cryohybernated, or lyophilized. In some embodiments, synthesis or secretion of the vaccine in the absence of the nucleus is performed by the cell without the nucleus for greater than or equal to about 3 days. In some embodiments, the cell without the nucleus is in a pharmaceutically acceptable carrier. In some embodiments, the cell without the nucleus is in a dosage of between about 10³ cells/kg body weight to about 10¹² cells/kg body weight. In some embodiments, the cell without the nucleus is in a dosage of between at least or about 10³, 10⁴, 10⁵, 10⁶, 10⁷, 10⁸, 10⁹, 10¹⁰, 10¹¹, 10¹² cells/kg body. In some embodiments, the cell without the nucleus is in a dosage of between at most or about 10³, 10⁴, 10⁵, 10⁶, 10⁷, 10⁸, 10⁹, 10¹⁰, 10¹¹, 10¹² cells/kg body. In some embodiments, the cell without the nucleus is isolated and purified.

[0013] Aspects disclosed here provide a population of cells comprising a plurality of the cell without the nucleus described herein.

[0014] Aspects disclosed herein provide methods of delivering to a subject a vaccine, the method comprising administering to the subject a first dose of a cell of the plurality of cells described herein. In some embodiments, the subject becomes vaccinated following administration. In some embodiments, administering is performed at least 24 hours following removing the cell from cryohibernation or cryopreservation. In some embodiments, administering is performed at least 48 hours following removing the cell of from cryohibernation or cryopreservation. In some embodiments, the cell without the nucleus is viable following lyophilization for at least 24 hours. In some embodiments, viability is measured using Trypan blue dye exclusion as described herein. In some embodiments, the Trypan blue dye exclusion is performed by: (a) centrifuging an aliquot of a plurality of the cell without the nucleus in a suspension to create a cell pellet; (b) resuspending the cell pellet in serum-free medium to produce a serum-free cell suspension; (c) mixing 1 part Trypan blue dye and 1 part of the serum-free cell suspension; (d) counting the plurality of the cells without the nucleus within 3-5 minutes of (c), wherein at least some of the plurality of cells without the nucleus are unstained with the Trypan blue dye, which is indicative of viability. In some embodiments, viability is measured using Annexin-5 cell surface staining as described herein. In some embodiments, the cell synthesizes or secretes the vaccine in the subject in the absence of the nucleus for greater than or equal to about 3 days. In some embodiments, the cell synthesizes or secretes the vaccine in the subject in the absence of the nucleus for between about 3 to 5 days. In some embodiments, methods further comprise administering a second dose of a second cell of the population of cells to the subject at least 1 month following administering the first dose of the cell. In some embodiments, methods further comprise administering a third dose of a second cell of the population of cells to the subject at least 2 months following administering the first dose of the cell.

[0015] Aspects disclosed herein provide methods comprising administering to a subject in need thereof a cell without a nucleus that synthesizes or secretes a therapeutic agent in an absence of the nucleus, wherein the therapeutic agent is therapeutically effective to treat a disease or condition associated with an infection by a virus encoded by a sequence with a sequence identity of greater than or equal to about 80%, 81%, 82%, 83%, 84%, 85%, 86%, 87% 88%, 89% 90%, 91%, 92%, 93%, 94%, 95%, 96%, 97%, 98%, 99% of SEQ ID NO: 1. In some embodiments, methods further comprise treating the disease or condition in the subject. In some embodiments, the therapeutic agent is: (a) an agonist of interleukin 10; (b) an antagonist of interleukin 10; (c) interleukin 6; (d) tumor necrosis factor (TNF); (e) a portion of any one of (a) to (d); or (e) a combination of any of (a) to (d). In some embodiments, the agonist of interleukin 10 is interleukin 10, or portion thereof, comprises an amino acid sequence with a sequence identity of greater than or equal to about 80%, 81%, 82%, 83%, 84%, 85%, 86%, 87% 88%, 89% 90%, 91%, 92%, 93%, 94%, 95%, 96%, 97%, 98%, 99% to SEQ ID NO: 13. In some embodiments, the agonist of interleukin 10, or portion thereof, further comprises an amino acid sequence encoding albumin or a portion thereof. In some embodiments, the therapeutic agent is secreted by the cell. In some embodiments, the agonist of interleukin 6, or portion thereof, comprises an amino acid sequence with a sequence identity of greater than or equal to about 80%, 81%, 82%, 83%, 84%, 85%, 86%, 87% 88%, 89% 90%, 91%, 92%, 93%, 94%, 95%, 96%, 97%, 98%, 99% to SEQ ID NO: 14. In some embodiments, the agonist of TNF comprises an amino acid sequence with a sequence identity of greater than or equal to about 80%, 81%, 82%, 83%, 84%, 85%, 86%, 87% 88%, 89% 90%, 91%, 92%, 93%, 94%, 95%, 96%, 97%, 98%, 99% to SEQ ID NO: 15. In some embodiments, the cell without the nucleus further comprises a homing receptor that is specific to a ligand expressed on one or more cells in lung tissue of the subject. In some embodiments, the homing receptor comprises P-selectin glycoprotein ligand-1, C-C Motif Chemokine Receptor 2, or C-X-C Motif Chemokine Receptor 4, or a combination thereof. In some embodiments, the cell further comprises a homing receptor that is specific to a ligand expressed on one or more cells in lymph tissue of the subject. In some embodiments, the homing receptor comprises C-X-C chemokine receptor type 3, leukosialin, CD44 antigen, C-C chemokine receptor type 7, L-selectin, lymphocyte function-associated antigen 1, or very late antigen-4, or a combination thereof. In some embodiments, the cell without the nucleus further comprises an immune-modulator comprising granulocyte-macrophage colony-stimulating factor (GM-CSF). In some embodiments, the disease or condition is a respiratory disease or condition. In some embodiments, the disease or condition comprises symptoms of coronavirus disease (COVID). In some embodiments, the COVID is COVID-19.

[0016] Aspects disclosed herein provide methods comprising administering to a subject in need thereof a cell without a nucleus that synthesizes or secretes a therapeutic agent in an absence of the nucleus, wherein the therapeutic agent is therapeutically effective to treat a disease or condition caused, at least in part, by an infection by a pathogen. In some embodiments, the pathogen is a virus, a bacterium, a fungus, or a toxin. In some embodiments, the virus is an oncolytic virus. In some embodiments, the toxin is Clostridium botulinum toxin, epsilon toxin of Clostridium perfringens, Staphylococcal enterotoxin B, or Ricin toxin from Ricinus communis, or any combination thereof. In some embodiments, the bacterium is Bacillus anthracis, Yersinia pestis, Francisella tularensis, Brucella, salmonella, Escherichia coli O 157:H7, Shigella, Burkholderia mallei, Burkholderia pseudomallei, Chlamydia psittaci, Coxiella burnetii, Rickettsia prowazekii, Vibrio cholerae, or Cryptosporidium parvum, or any combination thereof. In some embodiments, the therapeutic agent is: (a) an agonist of interleukin 10; (b) an antagonist of interleukin 10 (e.g., GIT27, AS101, mesopram, or rituximab); (c) interleukin 6; (d) tumor necrosis factor (TNF); (e) a portion of any one of (a) to (d); or (e) a combination of any of (a) to (d). In some embodiments, the agonist of interleukin 10 is interleukin 10, or portion thereof, comprises an amino acid sequence with a sequence identity of greater than or equal to about 80%, 81%, 82%, 83%, 84%, 85%, 86%, 87% 88%, 89% 90%, 91%, 92%, 93%, 94%, 95%, 96%, 97%, 98%, 99% to SEQ ID NO: 13. In some embodiments, the agonist of interleukin 10, or portion thereof, further comprises an amino acid sequence encoding albumin or a portion thereof. In some embodiments, the therapeutic agent is secreted by the cell. In some embodiments, the agonist of interleukin 6, or portion thereof, comprises an amino acid sequence with a sequence identity of greater than or equal to about 80%, 81%, 82%, 83%, 84%, 85%, 86%, 87% 88%, 89% 90%, 91%, 92%, 93%, 94%, 95%, 96%, 97%, 98%, 99% to SEQ ID NO: 14. In some embodiments, the agonist of TNF comprises an amino acid sequence with a sequence identity of greater than or equal to about 80%, 81%, 82%, 83%, 84%, 85%, 86%, 87% 88%, 89% 90%, 91%, 92%, 93%, 94%, 95%, 96%, 97%, 98%, 99% to SEQ ID NO: 15. In some embodiments, the cell without the nucleus further comprises a homing receptor that is specific to a ligand expressed on one or more cells in lung tissue of the subject. In some embodiments, the homing receptor comprises P-selectin glycoprotein ligand-1, C-C Motif Chemokine Receptor 2, or C-X-C Motif Chemokine Receptor 4, or a combination thereof. In some embodiments, the cell further comprises a homing receptor that is specific to a ligand expressed on one or more cells in lymph tissue of the subject. In some embodiments, the homing receptor comprises C-X-C chemokine receptor type 3, leukosialin, CD44 antigen, C-C chemokine receptor type 7, L-selectin, lymphocyte function-associated antigen 1, or very late antigen-4, or a combination thereof. In some embodiments, the cell without the nucleus further comprises an immune-modulator comprising granulocyte-macrophage colony-stimulating factor (GM-CSF). In some embodiments, the disease or condition is provided in Tables 3-6.

[0017] Aspects disclosed herein provide methods of treating a pathogen-associated disease or condition, the method comprising: (a) administering to a subject with an infection by a pathogen a plurality of cells substantially free of nuclei, thereby sequestering the pathogen from the subject in vivo by (i) permitting infection of at least one cell without a nucleus of the plurality of cells administered to the subject in (a) by the pathogen; and (ii) following (i), preventing propagation of the pathogen within the at least one cell without the nucleus; and (b) treating the pathogen-associated disease or condition by at least one of: (i) removing or reducing the pathogen from the at least one cell of the plurality of cells in vivo; and (ii) substantially removing the at least one cell without the nucleus from the subject. In some embodiments, the at least one cell without the nucleus comprises a homing receptor that is specific to a ligand expressed on one or more cells in lymph tissue of the subject. In some embodiments, the homing receptor comprises C-X-C chemokine receptor type 3, leukosialin, CD44 antigen, C-C chemokine receptor type 7, L-selectin, lymphocyte function-associated antigen 1, or very late antigen-4, or a combination thereof. In some embodiments, the pathogen is a coronavirus. In some embodiments, the coronavirus is encoded by a nucleic acid sequence with a sequence identity that is greater than or equal to about 80%, 81%, 82%, 83%, 84%, 85%, 86%, 87% 88%, 89% 90%, 91%, 92%, 93%, 94%, 95%, 96%, 97%, 98%, 99% to SEQ ID NO: 1. In some embodiments, the at least one cell without the nucleus comprises an immune-modulator comprising: (a) granulocyte-macrophage colony-stimulating factor; (b) a cytokine; (c) a portion of (a) or (b); or (d) any combination of (a) to (c). In some embodiments, the at least one cell without the nucleus comprises one or more intracellular organelles sufficient to synthesize or secrete one or more of (a) to (d). In some embodiments, the cytokine comprises an amino acid sequence with a sequence identity of greater than or equal to about 80%, 81%, 82%, 83%, 84%, 85%, 86%, 87% 88%, 89% 90%, 91%, 92%, 93%, 94%, 95%, 96%, 97%, 98%, 99% to SEQ ID NOs: 13, 14, or 15, or a combination thereof. In some embodiments, the cytokine is secretory. In some embodiments, the at least one cell without the nucleus has a diameter that is between bout 1 micrometers (μm) to 100 μm. In some embodiments, the at least one cell without the nucleus has a diameter is about 8 μm. In some embodiments, methods further comprise removing the plurality of cells substantially free of nuclei from cryohybernation or cryopreservation prior to administering in (a). In some embodiments, the plurality of cells substantially free of nucleic is viable for at least 24 hours following removing the plurality of cells substantially free of nuclei from cryohybernation, cryopreservation, or lyophilization. In some embodiments, the cell without the nucleus is viable following lyophilization for at least 24 hours. In some embodiments, the cell without the nucleus is cryopreserved, cryohybernated, or lyophilized. In some embodiments, the cell without a nucleus is isolated or purified. In some embodiments, viability is measured using Trypan blue dye exclusion as described herein. In some embodiments, the Trypan blue dye exclusion is performed by: (a) centrifuging an aliquot of a plurality of the cell without the nucleus in a suspension to create a cell pellet; (b) resuspending the cell pellet in serum-free medium to produce a serum-free cell suspension; (c) mixing 1 part Trypan blue dye and 1 part of the serum-free cell suspension; (d) counting the plurality of the cells without the nucleus within 3-5 minutes of (c), wherein at least some of the plurality of cells without the nucleus are unstained with the Trypan blue dye, which is indicative of viability. In some embodiments, viability is measured using Annexin-5 cell surface staining as described herein. In some embodiments, treating the pathogen-associated disease or condition in (b) is by removing or reducing the pathogen from the at least one cell of the plurality of cells. In some embodiments, the at least one cell comprises an anti-viral agent effective to reduce or removing the pathogen from the at least one cell. In some embodiments, treating the pathogen-associated disease or condition in (b) is by substantially removing the at least one cell without the nucleus from the subject. In some embodiments, the plurality of cells are not red blood cells or red blood cell precursors. In some embodiments, the at least one cell without the nucleus comprises an heterologous polynucleotide encoding a neutralizing antibody that blocks binding between the pathogen and a pathogen-recognized receptor expressed by a cell of the subject. In some embodiments, methods further comprise secreting the neutralizing antibody, by the at least one cell without the nucleus, in the absence of the nucleus, thereby reducing or ameliorating binding between the pathogen and a pathogen-recognized moiety of a cell of the subject. In some embodiments, the pathogen is a virus, bacterium, toxin, or fungus. In some embodiments, the virus is an oncolytic virus. In some embodiments, the virus is a coronavirus. In some embodiments, the coronavirus is SARS-CoV-2, or a variant thereof. In some embodiments, the toxin is Clostridium botulinum toxin, epsilon toxin of Clostridium perfringens, Staphylococcal enterotoxin B, or Ricin toxin from Ricinus communis, or any combination thereof. In some embodiments, the bacterium is Bacillus anthracis, Yersinia pestis, Francisella tularensis, Brucella, salmonella, Escherichia coli O 157:H7, Shigella, Burkholderia mallei, Burkholderia pseudomallei, Chlamydia psittaci, Coxiella burnetii, Rickettsia prowazekii, Vibrio cholerae, or Cryptosporidium parvum, or any combination thereof.

### Incorporation by Reference

[0018] All publications, patents, and patent applications mentioned in this specification are herein incorporated by reference to the same extent as if each individual publication, patent, or patent application was specifically and individually indicated to be incorporated by reference. To the extent publications and patents or patent applications incorporated by reference contradict the disclosure contained in the specification, the specification is intended to supersede and/or take precedence over any such contradictory material.

### BRIEF DESCRIPTION OF THE DRAWINGS

[0019] Some novel features of the methods and compositions disclosed herein are set forth in the present disclosure. A better understanding of the features and advantages of the methods and compositions disclosed herein will be obtained by reference to the following detailed description that sets forth illustrative embodiments, in which the principles of the disclosed compositions and methods are utilized, and the accompanying drawings of which:

[0020] FIG. 1 shows a process for engineering cells for the rapid virus vaccine platform according to an embodiment of the present disclosure.

[0021] FIG. 2 shows a timeline for production of a vaccine using the rapid virus vaccine platform according to an embodiment of the present disclosure, as compared to a traditional vaccine development timeline.

[0022] FIG. 3 shows a process for deploying the rapid virus vaccine platform to address a newly identified virus according to an embodiment of the present disclosure.

[0023] FIG. 4 shows a process by which cytoplasts described herein trap and clear live virus (e.g., coronavirus) according to an embodiment of the present disclosure.

[0024] FIG. 5 shows non-limiting examples of the benefits of the rapid virus vaccine platform described herein.

[0025] FIG. 6A is a representative line graph showing the viability of MSC and MSC-derived cytoplasts immediately after recovery from cryohibernation at 4 degrees Celsius for the indicated amounts of time. Viability was assessed in an automated cell count (Cell Countess) using Trypan blue dye exclusion and displayed as a ratio to the number of input cells.

[0026] FIG. 6B is a representative bar graph comparing the migrated MSC and MSC-derived cytoplasts in a Boyden chamber assay immediately after recovery from cryohibernation at 4 degrees Celsius for the indicated amounts of time. Cells and cytoplasts were allowed to migrate for 3 hours with either no serum (negative control) or 10% premium FBS (P-FBS) as a chemoattractant in the bottom chamber, and counts were normalized to loading controls.

[0027] FIG. 7A is a schematic representation of an interleukin 10 (IL-10) mRNA transfected into MSC and cytoplasts. Kozak sequence was added in front of the start codon of the IL-10 mRNA coding region (CDS). 5′UTR and 3′UTR of human beta globin (HBB) mRNA were added respectively to the 5′ and 3′ end of IL-10 CDS. An artificial 5′Cap was added to the 5′ end of the IL-10 mRNA and the pseudouridine modification was engineered to increase mRNA stability.

[0028] FIG. 7B is a bar graph showing IL-10 concentration in the culture medium of transfected (++) or non-transfected (−−) MSC or MSC-derived cytoplasts. MSC-derived cytoplasts were transfected with IL-10 mRNA, then seeded in a 24 well plate at 2.5×10⁴ cells/well. Conditioned medium (CM) was collected 24 hours after transfection and the IL-10 concentration determined by ELISA.

[0029] FIG. 7C is an immunoblot showing protein expression of Stat3 and phosphorylated Stat3 (P-Stat3, a marker of IL-10 activation) in serum-starved RAW macrophage cells treated with the indicated conditioned media (CM) from MSCs or cytoplasts treated as in FIG. 7B for 1 hour. Untreated=no CM treated control. Complete medium=RAW cells treated with MSC complete culture medium. MSC Ctrl=RAW cells treated with CM from non-transfected MSCs. MSC IL-10=RAW cells treated with CM from IL-10 mRNA transfected MSCs. Cytoplast Ctrl=RAW cells treated with CM from non-transfected cytoplasts. Cytoplasts IL-10=RAW cells treated with CM from IL-10 mRNA transfected cytoplasts.

[0030] FIG. 7D is a bar graph showing the concentration of secreted IL-10 cytokine in the mouse blood as determined by ELISA. MSC or MSC-derived cytoplasts were treated as in FIG. 7B and retro-orbitally injected into the vasculature of C57BL/6 mice. Two hours after injection, animals were euthanized, and blood samples were collected by cardiac puncture. Mean±SEM; n=3.

[0031] FIG. 8A are representative bright field microscopy images of Crystal Violet-stained MSCs or MSC-derived cytoplasts in a Boyden chamber assay that invaded to the undersurface of 8.0 μm porous filters coated with Basement Membrane Extract (BME) towards 10% FBS as a chemoattractant for 24 hours. Negative=no FBS (negative control). Scale Bar=50 μm.

[0032] FIG. 8B is a representative bar graph showing the ratio of MSC or MSC-derived cytoplasts treated as in FIG. 8A that invaded to the undersurface of the membrane compared to the loading control. Mean±SEM; n=18.

[0033] FIG. 9A is representative epifluorescence microscopy images (upper panel) and phase contrast microscopy images (lower panel) of MSCs and cytoplasts in suspension media. Actin cortex was stained with Lifeact RFP, while the cell nucleus was stained with Vybrant® Dyecycle™ Green. Arrows point to cytoplasts and arrowhead points to MSC nucleus. Scale bar=20 μm.

[0034] FIG. 9B is a representative scatter plot showing the size distribution of MSCs and cytoplasts as measured with Nikon Element software. Mean±SEM; n=80.

[0035] FIG. 9C is a representative bar graph showing the detected Vybrant® DiD-labeled MSCs or cytoplasts present in lung. MSCs or cytoplasts were labeled with DiD dye and retro-orbitally injected into the vasculature of C57BL/6 mice. Tissues were harvested after 24 hours and cell suspensions analyzed by flow cytometry. Mean±SEM; n=3.

[0036] FIG. 9D is a representative bar graph showing the detected Vybrant® DiD labeled MSCs or cytoplasts present in liver. Mean±SEM; n=3. MSCs or cytoplasts were labeled with DiD dye and retro-orbitally injected into the vasculature of C57BL/6 mice. Tissues were harvested after 24 hours and cell suspensions analyzed by flow cytometry.

[0037] FIG. 10A is a representative scatter plot showing the number of DiD-labeled MSCs or cytoplasts detected in the lung. MSCs were cultured under standard adherent conditions (2D) or in suspension by the handing drop method (3D) to generate 3D cytoplasts. MSCs and cytoplasts were labeled with Vybrant® DiD dye and retro-orbitally injected into the vasculature of C57BL/6 mice. Tissues were harvested after 24 hours and cell suspensions analyzed by flow cytometry. Mean±SEM; n=2.

[0038] FIG. 10B is a representative scatter plot showing the number of DiD-labeled MSCs or cytoplasts detected in the liver. MSCs were cultured under standard adherent conditions (2D) or in suspension by the handing drop method (3D) to generate 3D cytoplasts. MSCs and cytoplasts were labeled with Vybrant® DiD dye and retro-orbitally injected into the vasculature of C57BL/6 mice. Tissues were harvested after 24 hours and cell suspensions analyzed by flow cytometry. Mean±SEM; n=2.

[0039] FIG. 10C is a representative scatter plot showing the number of Vybrant® DiD-labeled MSCs or cytoplasts detected in the spleen. MSCs were cultured under standard adherent conditions (2D) or in suspension by the handing drop method (3D) to generate 3D cytoplasts. MSCs and cytoplasts were labeled with DiD dye and retro-orbitally injected into the vasculature of C57BL/6 mice. Tissues were harvested after 24 hours and cell suspensions analyzed by flow cytometry. Mean±SEM; n=2.

[0040] FIG. 11A-11B illustrate Epifluorescent microscopy images of nucleated parental MSCs (top) and MSC-derived cytoplast (bottom) infected with VSV-GFP (arrows) at MOI 0.05 at 12 hrs after infection. The GFP antigen was clearly and robustly expressed by MSCs without nuclei indicating viral replication and antigen production in enucleated cells. Scale bar=50 μm. FIG. 11B. High magnification epifluorescent image of an MSC-derived cell without nucleus infected with VSV-GFP (arrowheads) at MOI 0.1 at 12 hours after infection. The cytoplast was also stained for F-actin filaments using rhodamine phalloidin (arrows) and the nuclear stain DAPI to illustrate the lack of the nucleus.

[0041] FIG. 12A-12D illustrate Epifluorescent microscopy images (FIG. 12A) of MSC and MSC without nucleus infected with oHSV encoding GFP antigen at MOI 0.05 at 48 hrs after infection. MSCs without nuclei (cytoplast) were generated from MSCs 18 hrs after inoculation with oHSV-GFP. Scale bar=50 μm. FIG. 12B illustrates that MSCs or MSCs without nuclei expressing lifeact-RFP were infected with 0.05 MOI of the oncolytic herpes simplex virus encoding GFP (oHSV-GFP) then injected into established U87 glioblastoma tumors growing in Nude mice. Images were taken 7 days after the injection. Both MSCs and MSCs without nuclei delivered oHSV to tumor cells as indicated by the strong GFP signal. It was notable that very few MSCs without nuclei were detected in the tumor after 7 days, whereas a large number of MSCs were present in the center (injection site) and at the outer edge of the growing tumor. FIG. 12C is a bar graph showing percentage of GFP-covered tumor area, which represents the portion of tumor cells infected by MSCs or MSCs without nuclei carrying the oHSV-GFP virus. FIG. 12D is a graph showing the increased ratio of CD8+ effector T cells present in established glioblastoma tumors treated with combination of IL-12 (adjuvant) engineered MSCs without nuclei and oHSV engineered MSCs without nuclei compared to PBS injected controls.

[0042] FIG. 13A-13B illustrate enucleated mesenchymal stromal cells (MSCs) (cytoplasts) readily uptake cell permeable antigen peptides. FIG. 13A shows MSCs (left) and enucleated MSCs (cytoplast) (right) incubated with 100 μM of the cell-permeable antigen peptide (Arg)9-FAM (6-Carboxyfluorescein, FAM-Arg-Arg-Arg-Arg-Arg-Arg-Arg-Arg-Arg-OH). Scale bar=50 μm. Arrows indicate Hoechst stained nuclei, arrowheads indicate positive (Arg)9-FAM. FIG. 13B illustrates bar graphs represents relative fluorescence intensity measured in Image.J. Corrected Total Cell Fluorescence=Integrated Density−(Area of selected cell X Mean fluorescence of background readings). Mean±SEM; n=10.

### DETAILED DESCRIPTION

[0043] Disclosed herein are compositions and kits, and methods of their use to treat or prevent pathogenic infections (e.g., viral, fungal, parasite, bacterial) or a disease or condition associated with such pathogenic infections. The compositions of the present disclosure comprise cytoplasts, which are enucleated cells engineered to contain, and in some cases, produce a therapeutic agent that is effective to treat the disease or the condition associated with a pathogenic infection, and/or prevent the pathogenic infection. In some embodiments, the therapeutic agent described herein may be a vaccine (e.g., attenuated viral antigen), a virus-targeting agent effective to treat acute viral infections, or combinations of the two. In some embodiments, the cytoplast may also be engineered to trap pathogens (e.g., in vivo) and inactivate them to treat acute infections and prevent further infection. In some embodiments, the pathogens are one or more viruses, such as coronavirus.

[0044] Existing cell-based therapies have many shortcomings. Development of effective cell-based therapeutics often requires genetic engineering and the introduction of new genetic material into the genome of cells ex vivo. However, this process can introduce dangerous mutations into the genome that produce cancer and other life-threatening diseases, especially if the engineered cells permanently engraft into the body or fuse with host cells. Another significant problem with many existing cell-based therapeutics is that after delivery to the body, the cells proliferate uncontrollably and can permanently engraft into the body, which can be life-threatening. Also, the lack of cell control after administration to the subject can make the delivery of precise doses of therapeutic cells and their bioactive products difficult (e.g., poor pharmacokinetics). Thus, there exists a need for a safe and controllable cell-based therapy to deliver therapeutic agents or other biomolecules.

[0045] Prior to patient or subject delivery, traditional cell-based therapeutics are commonly modified or genetically altered ex vivo to generate desirable cellular and therapeutic functions. However, when these cells are introduced into the subject, the new host environment can significantly reprogram and negatively alter, or otherwise render them ineffective. Thus, there is a need for a more predictable cell-based therapy that cannot respond to reprogramming and detrimental external signals.

[0046] Cell-based therapies that exist today are limited by the amount of DNA-damaging/gene targeting agents can be loaded into them for delivery to subjects as a therapeutic against cancer or other diseases. This includes, but is not limited to, DNA-damaging chemotherapeutic drugs, DNA-integrating viruses, oncolytic viruses, and gene therapy applications/delivery including, but not limited to, cluster regularly interspaced short palindromic repeats (CRISPR), small clusters of Cas (CRISPR/Cas system), and plasmids. Thus, there is a need for a cell-based therapy without such limitations, which may be an ideal platform delivering high doses of cytotoxic therapeutic agents.

[0047] There are several advantages to delivering a therapeutic agent to a subject using the cytoplasts of the instant disclosure. Unlike conventional cell-based therapies that transfer DNA from their nuclei (e.g., nuclear-encoded genes or foreign or mutant DNA) to host cells unintentionally, the cytoplast of the present disclosure are unable to do so without a nucleus. Additionally, delivery of the therapeutic agent to the subject using the cytoplasts described herein is controllable and finite (e.g., 14 days or fewer), at least because, without a nucleus, the cytoplasts cannot proliferate or differentiate into other cell types. The cytoplasts of the present disclosure may, in the absence of a nucleus, express and/or secrete the therapeutic agent or other biomolecules described herein, as well as migrate or home to a target cell or target tissue or environment in vivo. This is achieved, at least in part, by enucleating a parent cell using the methods described herein such that the resulting cytoplast retains the organelles from the parent cell that are sufficient for normal biological function (e.g., protein production/secretion, cell motility, chemokine sensing, and like). Even when delivered to a subject systemically, the cytoplasts described herein deliver the therapeutic agent to a target tissue or a target cell in the subject (e.g., lymph tissue, lung tissue) efficiently and effectively in a manner that is safe and controllable. Moreover, manufacturing large quantities of conventional cell-based therapies is time intensive and expensive, which limits their clinical applications. Although, it is thought that using immortalized cells containing nuclei (e.g., hTERT) to increase manufacturing capabilities could increase manufacturing scale and lower manufacturing costs, there are concerns that immortalized cells are prone to chromosomal abnormalities and promote tumor or ectopic tissue formation, rendering them unsafe for clinical applications. By enucleating such cells, or any cell type, according to the embodiments of the instant disclosure, increased scale and lower costs associated with manufacturing the cytoplasts may be achieved, while mitigating the risks to human health posed by conventional cell-based therapies.

[0048] The improved manufacturing scale and cost, safety profile, and efficiency of the compositions described herein have important benefits for vaccine development. The methods for producing the compositions described herein are faster than conventional vaccine development timelines, which usually require the isolation and purification of the vaccine (e.g., antigen, mRNA) from the producer cell line. By contrast, cytoplasts of the present disclosure are engineered to continuously produce the anti-viral composition, obviating the need for isolation and purification of the vaccine. At the point of need, the compositions described herein may be administered systemically (e.g., inhalation), rather than by intramuscular injection, avoiding a need for a medical facility to administer the vaccine and improving patient experience. Due to the ability of the cytoplast to rapidly home to the lymph tissue (or other target tissue), the vaccine may be deployed to the lymphatic system of a subject in a fraction of the time it would take certain conventional cell-based therapies (e.g., exosomes) administered systemically. In addition, the small size of the cytoplast (e.g., about 8 micrometers) ensures that the cytoplasts are not trapped small openings in the vasculature and tissue parenchyma, thereby improving biodistribution as compared with conventional cell-based therapies. Cytoplasts disclosed herein, may be engineered to express virtually any type of vaccine or anti-viral agent (e.g., anti-viral and/or neutralizing antibody) to fight an active infection as well as prevent future infections. In addition, the cytoplasts described herein may be engineered to express more than one type of vaccine (e.g., against more than one type of pathogen), enabling a panel of vaccines to be administered to a subject in a single dosage form. This is particularly beneficial for rapidly evolving pathogens (e.g., SARS-CoV-2), which may require multiple vaccines in the future for an effective immunization strategy.

[0049] The cytoplasts disclosed here are an off-the-shelf solution to an urgent medical need. The cytoplasts may be engineered before or after enucleation to express targeting moieties (e.g., homing receptors), immune-evading moieties (e.g., “don't eat me” signaling peptides), among other biomolecules sufficient to target the cytoplast to the lymph tissue without risk of clearance by the immune system before they get there. The cytoplasts may be cryopreserved, cryo-hibernated, or cryodesiccated, and stored for long periods of time with their biological activity slowed or stopped. When there is an urgent medical need, the biological function of the cytoplasts may be restored (e.g., thawing, rehydrating), and remain viable for up to 5 days for further engineering (e.g., to express a vaccine or anti-viral agent) as needed before delivery. Such biological functions include, but are not limited to expression of therapeutic surface proteins, immune stimulating antigens, or receptors, secrete cytokines, hormones, or proteins, release of exosomes, shedding membrane particles, stimulate the immune system through death processes, or create tunneling nanotubes. The cytoplasts of the instant disclosure may be frozen and thawed multiple times during the manufacturing and distribution process, without negatively impacting the cytoplast intended function, making them an ideal platform for a rapid vaccine deployment.

[0050] In some embodiments, the cytoplasts of the instant disclosure can be therapeutic without being engineered to produce or deliver an exogenous vaccine or other biomolecule described herein. For example, an unmanipulated cytoplast itself can have therapeutic properties when delivered into a patient or subject, such as for example a cytoplast derived from a cell obtained from a subject immune to a pathogen of interest, similar to a convalescent plasma therapy approach. Such cell may naturally produce neutralizing antibodies that block pathogen-host receptor engagement. In some embodiments, an unmanipulated cytoplast can produce any one of the therapeutic agents or biomolecules described herein naturally, which may be used to achieve a therapeutic effect in a subject in need thereof.

[0051] Non-limiting examples of the many benefits of the rapid vaccine platform described herein are provided in FIG. 5. The production of cytoplasts may be scaled up rapidly, where hundreds of millions cytoplasts engineered to express viral antigen may be manufactured with ease and may be stored until needed. The cytoplasts described herein, in addition to being engineered to express viral antigen, may act as a trap. Such technical feature allows the engineered cytoplast to be infected by a pathogen, thus sequestering the pathogen and preventing the pathogen from infecting other cells. For example, the cytoplast described herein can be engineered to express ACE2 receptor to be infected by a SARS-CoV-2 virus expressing the Spike protein. Upon infection, the SARS-CoV-2 virus is trapped in the cytoplast may no longer replicate. The infected cytoplast may be targeted by the immune system for degradation. The cytoplast may be engineered to express chemokine receptor to home the cytoplast to target tissue or microenvironment such as lymph node.

[0052] Provided here are compositions, methods, and kits for the prevention or treatment of pathogenic infections in a subject. In some embodiments, the pathogenic infection is a viral infection, such as infection of coronavirus or influenza virus. In some embodiments, the pathogenic infection is a bacterial infection. Disclosed herein are cytoplasts that are engineered to express an anti-viral composition that are suitable to prevent viral infection or outbreak, or treat acute infections. When delivered to a subject, the cytoplast delivers the anti-viral composition to a target tissue either by presenting the anti-viral composition on the surface of the cytoplast or by secreting the anti-viral composition into extracellular space surrounding the target tissue.

[0053] In some embodiments, the cytoplasts of the present disclosure are also suitable for trapping pathogens in a subject by permitting infection of the cytoplast by the pathogen and preventing propagation of the pathogen in vivo. As shown in FIG. 4, the cytoplast described herein can express a viral receptor that can be recognized by the pathogen, promoting infection of the cytoplast. The pathogen, upon infecting the cytoplast, is sequestered in the cytoplast unable to replicate or propagate in the absence of a nuclear genome. After 5 days or fewer, the cytoplast is cleared from the subject using natural processes of phagocytosis. In some embodiments, the cytoplast activates the immune system to accelerate clearance of the virus in the subject. At least one advantage to the cytoplasts disclosed herein for preventing the propagation of a pathogen in vivo is that they lack a nucleus containing genetic information necessary for many pathogens to replicate.

[0054] Referring to FIG. 1, in some embodiments, cells (e.g., stem cells) that are genetically engineered prior to enucleation to express adhesion molecules, chemokine or retention receptors or both, that target a target cell or tissue, such as the lymph tissue (e.g., lymph nodes) or the lung tissue in a subject (STEP 1). Next, the engineered cells are enucleated using the methods described herein to produce the cytoplasts (STEP 2). The cytoplasts may then be engineered to express and, in some embodiments, secrete a vaccine or other biomolecule (e.g., therapeutic agent, neutralizing antibody), and/or immune modulators (e.g., immune activators) to enhance the adaptive immune response in the subject (STEP 3). Cytoplasts are further engineered as needed depending on the intended function. The resulting cytoplasts may be used as a trap for viral trap or to deploy a vaccine. In the non-limiting example of the viral trap, the cytoplast may not be engineered with a therapeutic (e.g., vaccine) payload. Although, in some cases, it may be advantageous to express and/or secrete neutralizing antibodies against the pathogen of interest to prevent future infections by the virus. In some embodiments, the virus in this example is a coronavirus, such as SARS-CoV-2. However, the workflow in FIG. 1 may be applicable to any pathogen described herein, including bacterial pathogens (e.g., Bacillus anthracis) or toxins posing a significant risk to human health.

[0055] The process of manufacturing the cytoplasts of the present disclosure from identification of a new pathogen (e.g., a virus) to distribution is roughly 2 months, as compared with traditional vaccine development, which is 12 months or longer. As shown in FIG. 2, the cytoplasts of the present disclosure may be prepared in advance of the viral outbreak and cryopreserved for a length of time. This means, the cytoplasts of the present disclosure (e.g., engineered to express the homing receptors, immune activators) may be rapidly deployed to address the next viral outbreak. Referring to FIG. 3, the cytoplasts that were prepared in advance and cryopreserved are engineered to secrete attenuated viral proteins. When administered to a subject in need thereof, the cytoplasts drive immune activation and production of neutralizing antibodies against the virus in the subject.

[0056] Methods of producing cytoplasts of the present disclosure are provided. In some embodiments, cells can be treated with cytochalasin B to soften the cortical actin cytoskeleton. The nucleus can then be physically extracted from the cell body by highspeed centrifugation in gradients of Ficoll to generate a nucleus-free (enucleated) cytoplast. Because cytoplast and intact nucleated cells sediment to different layers in the Ficoll gradient, cytoplasts can, in some embodiments, be easily isolated and prepared for therapeutic purposes or fusion to other cells (nucleated or enucleated). The enucleation process can be clinically scalable to process tens of millions of cells.

[0057] Disclosed herein are methods of using or delivering the cytoplasts of the present disclosure. The cytoplasts can be used as a homing vehicle to deliver clinically relevant cargos/payloads to treat healthy individuals (e.g., to improve energy, recovery from exercise, or to deliver natural products) or various diseases (e.g., any of the diseases described herein). For example, cytoplasts may be used to deliver supplements, anti-aging factors, preventative treatments, and the like to healthy individuals, e.g., individuals who have not been diagnosed with a specific disorder for which the delivered therapeutic is effective.

[0058] Also, provided herein are kits that include any composition described herein. For example, a kit can include instructions for using any of the compositions or methods described herein. In some embodiments, the kits can include at least one dose of any of the compositions described herein.

### I. COMPOSITIONS

[0059] Provided herein are compositions useful for treating or preventing a pathogen-associated disease or condition in a subject. In some embodiments, the compositions disclosed herein comprise a cytoplast (e.g., an enucleated cell) engineered to express an active agent suitable for the treatment or the prevention of a pathogen-associated disease or condition. In some embodiments, the pathogen-associated disease or condition is a viral infection, such as a coronavirus infection. In some embodiments, cytoplast is engineered to express an anti-viral composition, such as an attenuated viral antigen or anti-viral antibody, or a combination thereof. In some embodiments, the cytoplast comprises the anti-viral composition at the surface of the cytoplast (e.g., antigen presentation). In some embodiments, the anti-viral composition is secreted by the cytoplast into extracellular space at a target tissue. In some embodiments, the cytoplast is engineered to capture or trap a pathogen in vivo by permitting infection of the cytoplast and preventing propagation of the pathogen in vivo, thereby treating an acute pathogenic infection, or pathogen-associate disease or condition.

[0060] The cytoplasts described herein are engineered to have a limited or defined (e.g., known, or programmable) life span. The cytoplasts described herein have a reduced size compared to cells in some other cell-based therapies (e.g., exosomes, red blood cells, adoptive cell therapies), which In some embodiments, improves biodistribution.

[0061] The cytoplasts described herein maintain viability following cryohibernation or cryopreservation, making them uniquely suitable for widespread adoption as a platform for drug delivery. Cryopreservation includes cooling or freezing, and storing, in the short-term or long-term, biological material (e.g., cells, cytoplasts) at very low temperatures (e.g., −80° C. in solid CO₂, −196° C. in liquid nitrogen, etc.). Cryohibernation includes short-term cooling and storing of biological material (e.g., cells, cytoplasts) in suspended animation, at non-freezing temperatures, such as, e.g., at 4° C. Cryohibernation of cytoplasts can be advantageous for one or more of the following reasons: cryohibernation is less labor-intensive than cryopreservation, and cytoplasts that have undergone cryohibernation can be transported (e.g., shipped). In some embodiments, the cytoplast is cryopreserved. In some embodiments, the cytoplast is cryohybernated. Following removal of the cytoplast from cryohybernation or cryopreservation, the cytoplasts may be used in accordance with the methods described herein. In some embodiments, the cytoplasts are viable for at least or about 24 hours, 48 hours, 72, or any increment of time between 24 and 72 hours following removal from cryohybernation or cryopreservation. In some embodiments, the cytoplasts are viable for between about 24 and about 48 hours. In some embodiments, the cytoplasts are viable for between about 48 and about 72 hours. In some embodiments, viability is measured using trypan blue dye exclusion as described herein. In some embodiments, viability is measured using Annexin-5 cell surface staining as described herein.

[0062] The cytoplasts described herein are extensively engineered, to best suit a given therapeutic application. For example, the cytoplasts are engineered (e.g., with cell-surface receptors) that increase infection of the cytoplast by a target pathogen. In some embodiments, cytoplasts are engineered to express an attenuated viral antigen for use as a vaccine or an anti-viral antibody for use in treating acute viral infections. In another example the cytoplasts are engineered to produce or express a protein that specifically targets difficult tissues (e.g., muscle) and an active agent such as an attenuated viral antigen or anti-viral antibody. In addition, in some embodiments, the cytoplasts are engineered with immune evading moieties (e.g., CD34+) to avoid an antigenic response in the host. Cytoplasts are also engineered to express cell-surface receptors (e.g., adhesion molecules, chemokine receptors) used for cellular homing, chemokine sensing, and other biological functions that are essential to targeting damaged tissue in a predominately affected area.

[0063] In some embodiments, a cytoplast has a defined life span of less than 1 hour to 14 days (e.g., less than 1 hour to 1 hour, less than 1 hour to 6 hours, 6 hours to 12 hours, 12 hours to 1 day, 1 day, 2 days, 3 days, 4 days, 5, days, 6 days, 7 days, 8 days, 9 days, 10 days, 11 days, 13 days, 14 days, 1 to 14 days, 1 to 12 days, 1 to 10 days, 1 to 9 days, 1 to 8 days, 1 to 7 days, 1 to 6 days, 1 to 5 days, 1 to 4 days, 1 to 3 days, 1 to 2 days, 2 to 14 days, 2 to 12 days, 2 to 10 days, 2 to 8 days, 2 to 7 days, 2 to 6 days, 2 to 5 days, 2 to 4 days, 2 to 3 days, 3 to 14 days, 3 to 12 days, 3 to 10 days, 3 to 8 days, 3 to 7 days, 3 to 6 days, 3 to 5 days, 3 to 4 days, 4 to 14 days, 4 to 12 days, 4 to 10 days, 4 to 8 days, 4 to 7 days, 4 to 6 days, 4 to 5 days, 4 to 7 days, 5 to 14 days, 5 to 12 days, 5 to 10 days, 5 to 8 days, 5 to 7 days, 5 to 6 days, 6 to 14 days, 6 to 12 days, 6 to 10 days, 6 to 8 days, 6 to 7 days, 7 to 14 days, 7 to 12 days, 7 to 10 days, 7 to 8 days, 8 to 14 days, 8 to 12 days, 8 to 10 days, 10 to 14 days, 10 to 12 days, 12 to 14 days, less than 14 days, less than 12 days, less than 10 days, less than 8 days, less than 7 days, less than 6 days, less than 5 days, less than 4 days, less than 3 days, less than 2 days, less than 1 day, less than 12 hours, or less than 6 hours). In some embodiments, the lifespan of a population of cytoplasts can be evaluated by determining the average time at which a portion of the cytoplast population (e.g., at least 50%, at least 60% at least 70%, at least 75%, at least 80%, at least 85%, at least 90%, at least 95%, or at least 98% of the population) is determined to be dead. Cell death can be determined by any method known in the art. In some embodiments, the viability of cytoplasts, e.g., at one or more time points, can be evaluated by determining whether morphometric or functional parameters are intact (e.g. by trypan-blue dye exclusion, evaluating for intact cell membranes, evaluating adhesion to plastics (e.g., in adherent cytoplasts), evaluating cytoplast migration, negative staining with apoptotic markers, and the like). In some embodiments, the life span of a cytoplast may be related to the life span of the cell from which it was obtained. For example, in some embodiments, a cytoplast obtained from a macrophage may live 12 to 24 hours.

[0064] In some embodiments, a cytoplast is at least or equal to 1 μm in diameter. In some embodiments, a cytoplast is greater than 1 μm in diameter. In some embodiments, a cytoplast is 1-100 μm in diameter (e.g., 1-90 μm, 1-80 μm, 1-70 μm, 1-60 μm, 1-50 μm, 1-40 μm, 1-30 μm, 1-20 μm, 1-10 μm, 1-5 μm, 5-90 μm, 5-80 μm, 5-70 μm, 5-60 μm, 5-50 μm, 5-40 μm, 5-30 μm, 5-20 μm, 5-10 μm, 10-90 μm, 10-80 μm, 10-70 μm, 10-60 μm, 10-50 μm, 10-40 μm, 10-30 μm, 10-20 μm, 10-15 μm 15-90 μm, 15-80 μm, 15-70 μm, 15-60 μm, 15-50 μm, 15-40 μm, 15-30 μm, 15-20 μm). In some embodiments, a cytoplast is 10-30 μm in diameter. In some embodiments, the diameter of a cytoplast is between 5-25 μm (e.g., 5-20 μm, 5-15 μm. 5-10 μm, 10-25 μm, 10-20 μm, 10-15 μm, 15-25 μm, 15-20 μm, or 20-25 μm. In some embodiments, a cytoplast is not an exosome. Without being bound by any particular theory, it is believed that, In some embodiments, some cytoplasts can advantageously be small enough to allow for better biodistribution or to be less likely to be trapped in the lungs of a subject.

[0065] In some embodiments, cytoplasts can be applied to or cultured with cells (e.g., xenocultured cells) to alter their properties. For example, in some embodiments, cytoplasts (e.g., unmanipulated cytoplasts or engineered cytoplasts) can upregulate health-promoting factors in xenocultured cells, and in some embodiments, the xenocultured cells can be returned to the subject from which they were taken.

[0066] A. Cells

[0067] Provided herein are cells and cell lines that are engineered to produce the cytoplasts of the present disclosure. The cytoplast may be derived from a corresponding parent cell, such as a nucleated parent cell. Non-limiting examples of parent cells include an immortalized cell, a cancer cell (e.g., any cancer cell), a primary (e.g., host-derived) cell, or a cell line. In some embodiments, the parent cell is derived from a cell is immortalized using suitable methods, such as those described in Huang et al., J. Exp. Clin. Med. 2010 October. 221 2(5):202-217. In some embodiments, the cytoplast is derived from a parent cell using suitable methods provided in U.S. patent application Ser. No. 16/715,859, which is hereby incorporated by reference in its entirety.

[0068] In some embodiments, the cell can originate from any organism having one or more cells. Some non-limiting examples include: a prokaryotic cell, eukaryotic cell, a bacterial cell, an archaeal cell, a cell of a single-cell eukaryotic organism, a protozoa cell, a cell from a plant, an algal cell, a fungal cell, an animal cell, a cell from an invertebrate animal, a cell from a vertebrate animal, a cell from a mammal (e.g., a pig, a cow, a goat, a sheep, a rodent, a rat, a mouse, a non-human primate, a human, etc.), and etcetera. In some embodiments, the cell is a somatic cell. In some embodiments, the cell is a stem cell or a progenitor cell. In some embodiments, the cell is a mesenchymal stem or progenitor cell. In some embodiments, the cell is a mesenchymal stromal cell. A cell can originate from any organism having one or more cells.

[0069] Some non-limiting examples of cells include: a prokaryotic cell, eukaryotic cell, a bacterial cell, an archaeal cell, a cell of a single-cell eukaryotic organism, a protozoa cell, a cell from a plant (e.g. cells from plant crops, fruits, vegetables, grains, soy bean, corn, maize, wheat, seeds, tomatoes, rice, cassava, sugarcane, pumpkin, hay, potatoes, cotton, cannabis, tobacco, flowering plants, conifers, gymnosperms, ferns, clubmosses, hornworts, liverworts, mosses), an algal cell, (e.g., Botryococcus braunii, Chlamydomonas reinhardtii, Nannochloropsis gaditana, Chlorella pyrenoidosa, Sargassum patens C. Agardh, and the like), seaweeds (e.g. kelp), a fungal cell (e.g., a yeast cell, a cell from a mushroom), an animal cell, a cell from an invertebrate animal (e.g. fruit fly, cnidarian, echinoderm, nematode, etc.), a cell from a vertebrate animal (e.g., fish, amphibian, reptile, bird, mammal), a cell from a mammal (e.g., a pig, a cow, a goat, a sheep, a rodent, a rat, a mouse, a non-human primate, a human, etc.), and etcetera. Sometimes a cell is not originating from a natural organism (e.g. a cell can be a synthetically made, sometimes termed an artificial cell). In some embodiments, the cell is a somatic cell. In some embodiments, the cell is a stem cell or a progenitor cell. In some embodiments, the cell is a mesenchymal stem or progenitor cell. In some embodiments, the cell is a hematopoietic stem or progenitor cell. In some embodiments, the cell is a muscle cell, a skin cell, a blood cell, or an immune cell. Other exemplary cells can include lymphoid cells, such as B cell, T cell (Cytotoxic T cell, Natural Killer T cell, Regulatory T cell, T helper cell), Natural killer cell, cytokine induced killer (CIK) cells; myeloid cells, such as granulocytes (Basophil granulocyte, Eosinophil granulocyte, Neutrophil granulocyte/Hypersegmented neutrophil), Monocyte/Macrophage, Red blood cell (Reticulocyte), Mast cell, Thrombocyte/Megakaryocyte, Dendritic cell; cells from the endocrine system, including thyroid (Thyroid epithelial cell, Parafollicular cell), parathyroid (Parathyroid chief cell, Oxyphil cell), adrenal (Chromaffin cell), pineal (Pinealocyte) cells; cells of the nervous system, including glial cells (Astrocyte, Microglia), Magnocellular neurosecretory cell, Stellate cell, Boettcher cell, and pituitary (Gonadotrope, Corticotrope, Thyrotrope, Somatotrope, Lactotroph); cells of the Respiratory system, including Pneumocyte (Type I pneumocyte, Type II pneumocyte), Clara cell, Goblet cell, Dust cell; cells of the circulatory system, including Myocardiocyte, Pericyte; cells of the digestive system, including stomach (Gastric chief cell, Parietal cell), Goblet cell, Paneth cell, G cells, D cells, ECL cells, I cells, K cells, S cells; enteroendocrine cells, including enterochromaffm cell, APUD cell, liver (Hepatocyte, Kupffer cell), Cartilage/bone/muscle; bone cells, including Osteoblast, Osteocyte, Osteoclast, teeth (Cementoblast, Ameloblast); cartilage cells, including Chondroblast, Chondrocyte; skin cells, including Trichocyte, Keratinocyte, Melanocyte (Nevus cell); muscle cells, including Myocyte; urinary system cells, including Podocyte, Juxtaglomerular cell, Intraglomerular mesangial cell/Extraglomerular mesangial cell, Kidney proximal tubule brush border cell, Macula densa cell; reproductive system cells, including Spermatozoon, Sertoli cell, Leydig cell, Ovum; and other cells, including Adipocyte, Fibroblast, Tendon cell, Epidermal keratinocyte (differentiating epidermal cell), Epidermal basal cell (stem cell), Keratinocyte of fingernails and toenails, Nail bed basal cell (stem cell), Medullary hair shaft cell, Cortical hair shaft cell, Cuticular hair shaft cell, Cuticular hair root sheath cell, Hair root sheath cell of Huxley's layer, Hair root sheath cell of Henle's layer, External hair root sheath cell, Hair matrix cell (stem cell), Wet stratified barrier epithelial cells, Surface epithelial cell of stratified squamous epithelium of cornea, tongue, oral cavity, esophagus, anal canal, distal urethra and vagina, basal cell (stem cell) of epithelia of cornea, tongue, oral cavity, esophagus, anal canal, distal urethra and vagina, Urinary epithelium cell (lining urinary bladder and urinary ducts), Exocrine secretory epithelial cells, Salivary gland mucous cell (polysaccharide-rich secretion), Salivary gland serous cell (glycoprotein enzyme-rich secretion), Von Ebner's gland cell in tongue (washes taste buds), Mammary gland cell (milk secretion), Lacrimal gland cell (tear secretion), Ceruminous gland cell in ear (wax secretion), Eccrine sweat gland dark cell (glycoprotein secretion), Eccrine sweat gland clear cell (small molecule secretion). Apocrine sweat gland cell (odoriferous secretion, sex -hormone sensitive), Gland of Moll cell in eyelid (specialized sweat gland), Sebaceous gland cell (lipid-rich sebum secretion), Bowman's gland cell in nose (washes olfactory epithelium), Brunner's gland cell in duodenum (enzymes and alkaline mucus), Seminal vesicle cell (secretes seminal fluid components, including fructose for swimming sperm), Prostate gland cell (secretes seminal fluid components), Bulbourethral gland cell (mucus secretion), Bartholin's gland cell (vaginal lubricant secretion), Gland of Littre cell (mucus secretion), Uterus endometrium cell (carbohydrate secretion), Isolated goblet cell of respiratory and digestive tracts (mucus secretion), Stomach lining mucous cell (mucus secretion), Gastric gland zymogenic cell (pepsinogen secretion), Gastric gland oxyntic cell (hydrochloric acid secretion), Pancreatic acinar cell (bicarbonate and digestive enzyme secretion), Paneth cell of small intestine (lysozyme secretion), Type II pneumocyte of lung (surfactant secretion), Clara cell of lung, Hormone secreting cells, Anterior pituitary cells, Somatotropes, Lactotropes, Thyrotropes, Gonadotropes, Corticotropes, Intermediate pituitary cell, Magnocellular neurosecretory cells, Gut and respiratory tract cells, Thyroid gland cells, thyroid epithelial cell, parafollicular cell, Parathyroid gland cells, Parathyroid chief cell, Oxyphil cell, Adrenal gland cells, chromaffin cells, Ley dig cell of testes, Theca interna cell of ovarian follicle, Corpus luteum cell of ruptured ovarian follicle, Granulosa lutein cells, Theca lutein cells, Juxtaglomerular cell (renin secretion), Macula densa cell of kidney, Metabolism and storage cells, Barrier function cells (Lung, Gut, Exocrine Glands and Urogenital Tract), Kidney, Type I pneumocyte (lining air space of lung), Pancreatic duct cell (centroacinar cell), Nonstriated duct cell (of sweat gland, salivary gland, mammary gland, etc.), Duct cell (of seminal vesicle, prostate gland, etc.), Epithelial cells lining closed internal body cavities, Ciliated cells with propulsive function, Extracellular matrix secretion cells, Contractile cells; Skeletal muscle cells, stem cell, Heart muscle cells, Blood and immune system cells, Erythrocyte (red blood cell), Megakaryocyte (platelet precursor), Monocyte, Connective tissue macrophage (various types), Epidermal Langerhans cell, Osteoclast (in bone), Dendritic cell (in lymphoid tissues), Microglial cell (in central nervous system), Neutrophil granulocyte, Eosinophil granulocyte, Basophil granulocyte, Mast cell, Helper T cell, Suppressor T cell, Cytotoxic T cell, Natural Killer T cell, B cell, Natural killer cell, Reticulocyte, Stem cells and committed progenitors for the blood and immune system (various types), Pluripotent stem cells, Totipotent stem cells, Induced pluripotent stem cells, adult stem cells, Sensory transducer cells, Autonomic neuron cells, Sense organ and peripheral neuron supporting cells, Central nervous system neurons and glial cells, Lens cells, Pigment cells, Melanocyte, Retinal pigmented epithelial cell, Germ cells, Oogonium/Oocyte, Spermatid, Spermatocyte, Spermatogonium cell (stem cell for spermatocyte), Spermatozoon, Nurse cells, Ovarian follicle cell, Sertoli cell (in testis), Thymus epithelial cell, Interstitial cells, and Interstitial kidney cells.

[0070] Non-limiting examples of eukaryotic cells include mammalian (e.g., rodent, non-human primate, or human), non-mammalian animal (e.g., fish, bird, reptile, or amphibian), invertebrate, insect, fungal, or plant cells. In some embodiments, the eukaryotic cell is a yeast cell, such as Saccharomyces cerevisiae. In some embodiments, the eukaryotic cell is a higher eukaryote, such as mammalian, avian, plant, or insect cells. In some embodiments, the nucleated cell is a primary cell. In some embodiments, the nucleated cell is an immune cell (e.g., a lymphocyte (e.g., a T cell, a B cell), a macrophage, a natural killer cell, a neutrophil, a mast cell, a basophil, a dendritic cell, a monocyte, a myeloid-derived suppressor cell, an eosinophil). In some embodiments, the nucleated cell is a phagocyte or a leukocyte. In some embodiments, the nucleated cell is a stem cell (e.g., an adult stem cell (e.g., a hematopoietic stem cell, a mammary stem cell, an intestinal stem cell, mesenchymal stem cell, an endothelial stem cell, a neural stem cell, an olfactory adult stem cell, a neural crest stem cell, a testicular cell), an embryonic stem cell, an inducible pluripotent stem cell (iPS)). In some embodiments, the nucleated cell is a progenitor cell. In some embodiments, the nucleated cell is from a cell line. In some embodiments, the nucleated cell is a suspension cell. In some embodiments, the nucleated cell is an adherent cell. In some embodiments, the nucleated cell is a cell that has been immortalized by expression of an oncogene. In some embodiments, the nucleated cell is immortalized by the expression of human telomerase reverse transcriptase (hTERT) or any oncogene. In some embodiments, the nucleated cell is a patient or subject derived cell (e.g., an autologous patient-derived cell, or an allogenic patient-derived cell). In some embodiments, the nucleated cell is transfected with a vector (e.g., a viral vector (e.g., a retrovirus vector (e.g., a lentivirus vector), an adeno-associated virus (AAV) vector, a vesicular virus vector (e.g., vesicular stomatitis virus (VSV) vector), or a hybrid virus vector), a plasmid) before the nucleated cell is enucleated using any of the enucleation techniques described herein and known in the art.

[0071] In some embodiments, the cytoplast can be derived from a cell autologous to the subject. In some embodiments, the cytoplast can be derived from a cell allogenic to the subject.

[0072] In some embodiments, the cytoplast is derived from an immune cell. In some embodiments, the cytoplast is derived from a natural killer (NK) cell, a neutrophil, a macrophage, a lymphocyte, a fibroblast, an adult stem cell (e.g., hematopoietic stem cell, a mammary stem cell, an intestinal stem cell, a mesenchymal stem cell, a mesenchymal stromal cell, an endothelial stem cell, a neural stem cell, an olfactory adult stem cell, a neural crest stem cell, a skin stem cell, or a testicular cell), a mast cell, a basophil, an eosinophil, or an inducible pluripotent stem cell.

[0073] In some embodiments, prior to enucleation, two or more cells (e.g., any of the cells disclosed herein) are fused by any method disclosed herein or known in the art. Enucleation of the fusion product can result in a cytoplast.

[0074] In some embodiments, a first cytoplast is fused to a cell or second cytoplast. In some embodiments, the cell is any nucleated (e.g., a mammalian cell (e.g., a human cell, or any mammalian cell described herein), a protozoal cell (e.g., an amoeba cell), an algal cell, a plant cell, a fungal cell, an invertebrate cell, a fish cell, an amphibian cell, a reptile cell, or a bird cell). In some embodiments, the second cell is a synthetic cell. Accordingly, provided are methods of altering the behavior of a cell comprising fusing the cell with any of the cytoplasts described herein. Also provided herein are methods comprising administering to a subject a therapeutically effective amount of a cell to which a cytoplast has been fused.

[0075] In some embodiments, the second cytoplast is derived from the same type of cell as the first cytoplast. In some embodiments, the second cytoplast is derived from a different type of cell as the first cytoplast. In some embodiments, the second cytoplast contains or expresses at least one therapeutic DNA molecule, therapeutic RNA molecule, therapeutic protein, therapeutic peptide, small molecule therapeutic, therapeutic gene editing factor, a therapeutic nanoparticle, or another active agent that is the same as a therapeutic DNA molecule, therapeutic RNA molecule, therapeutic protein, therapeutic peptide, small molecule therapeutic, therapeutic gene editing factor, a therapeutic nanoparticle contained in or expressed by the first cytoplast. In some embodiments, the second cytoplast contains or expresses at least one therapeutic DNA molecule, therapeutic RNA molecule, therapeutic protein, therapeutic peptide, small molecule therapeutic, therapeutic gene editing factor, a therapeutic nanoparticle, or another active agent that is different from a therapeutic DNA molecule, therapeutic RNA molecule, therapeutic protein, therapeutic peptide, small molecule therapeutic, therapeutic gene editing factor, a therapeutic nanoparticle contained in or expressed by the first cytoplast. In some embodiments, a first cytoplast can be fused to a cell or to a second cytoplast using any method known in the art, for example, electrofusion or viral fusion using viral-based cell surface peptides.

[0076] In some embodiments, a cytoplast is not a naturally occurring enucleated cell. In some embodiments, a cytoplast is not obtained from a cell that naturally undergoes enucleation. In some embodiments, a cytoplast is not a cell that has been enucleated by in the body of a subject. In some embodiments, a cytoplast is not obtained from a cell that would be enucleated by in the body of a subject. In some embodiments, a cytoplast is not obtained from an erythroblast. In some embodiments, a cytoplast is obtained from a cell that maintains a nucleus over its lifespan (e.g., in the absence of manipulations such as enucleation as described herein). In some embodiments, a cytoplast is not a cell that is found in a subject as an anucleate cell (e.g., a red blood cell (erythrocyte), a platelet, a lens cell, or an immediate nucleated precursor thereof). In some embodiments, a cytoplast includes one or more components selected from the group consisting of an endoplasmic reticulum, a Golgi apparatus, mitochondria, ribosomes, proteasomes, or spliceosomes. In some embodiments, a cytoplast is characterized by one or more of the following features: adhesion, tunneling nanotube formation, actin-mediated spreading (2D and/or 3D), migration, chemoattractant gradient sensing, mitochondrial transfer, mRNA translation, protein synthesis, and secretion of exosomes and/or other bioactive molecules. In some embodiments, a cytoplast is characterized by an ability to secrete proteins (e.g., using exosomes). In some embodiments, a cytoplast has been enucleated ex vivo. In some embodiments, a cytoplast has been enucleated in vitro. In some embodiments, a cytoplast has been physically enucleated (e.g., by centrifugation). In some embodiments, a cytoplast is an engineered enucleated cell. In some embodiments, a cytoplast is not a red blood cell. In some embodiments, a cytoplast does not contain hemoglobin. In some embodiments, a cytoplast does not have a bi-concave shape.

[0077] In some embodiments, a cytoplast is not obtained from an erythroblast. In some embodiments, a cytoplast is obtained from a cell that would not become a red blood cell (RBC). Unlike RBCs cytoplasts can be viable cell-like entities that can retain many active biological processes and all cellular organelles (e.g., ER/Golgi, mitochondrial, endosome, lysosome, cytoskeleton, etc.). Thus, cytoplasts can function like nucleated cells and exhibit critical biological functions such as adhesion, tunneling nanotube formation, actin-mediated spreading (2D and 3D), migration, chemoattractant gradient sensing, mitochondrial transfer, mRNA translation, protein synthesis, and secretion of exosomes and other bioactive molecules. One or more of these functions may not be exhibited by RBCs. Compared to RBCs, which are derived from erythroblasts, a cytoplast can be derived from any type of nucleated cell, including, but not limited to iPSC (induced pluripotent stem cells), any immortalized cell, stem cells, primary cells (e.g., host-derived cells), cell lines, any immune cell, cancerous cells, or from any eukaryotic cell. In some embodiments, a cytoplast is obtained from a lymphoid progenitor cell. In some embodiments, a cytoplast is obtained from a lymphocyte. In some embodiments, a cytoplast is obtained from a mesenchymal stem cell (e.g., from bone marrow). In some embodiments, a cytoplast is obtained from an endothelial stem cell. In some embodiments, a cytoplast is obtained from a neural stem cell. In some embodiments, a cytoplast is obtained from a skin stem cell.

[0078] B. Pathogens

[0079] The cytoplasts described herein and compositions containing the cytoplasts, in some embodiments, comprise biomolecules (e.g., vaccine, therapeutic agent, targeting moieties) that target and/or kill, or otherwise render inoperable, a pathogen. In some embodiments, the pathogen is a bacteria, a virus, a fungus, or a toxin. In some embodiments, the pathogen is naturally occurring. In some embodiments, the pathogen is synthetic.

[0080] In some embodiments, the pathogen is a virus. In some embodiments, the virus is an animal virus, a plant virus, a bacterial virus, or an archaeal virus. In some embodiments, the animal virus causes a disease or condition in the same or a different animal. In some embodiments, the virus is an RNA virus or a DNA virus. In some embodiments, the RNA or DNA virus is single-stranded or double-stranded. In some embodiments, the DNA or RNA virus is a positive-sense or a negative-sense virus.

[0081] In some embodiments, the double-stranded virus (dsDNA) virus is from the family: Myoviridae, Podoviridae, Siphoviridae, Alloherpesviridae, Herpesviridae, Malacoherpesviridae, Lipothrixviridae, Rudiviridae, Adenoviridae, Ampullaviridae, Ascoviridae, Asfaviridae, Baculoviridae, Bicaudaviridae, Clavaviridae, Corticoviridae, Fuselloviridae, Globuloviridae, Guttaviridae, Hytrosaviridae, Iridoviridae, Marseilleviridae, Mimiviridae, Nimaviridae, Pandoraviridae, Papillomaviridae, Phycodnaviridae, Plasmaviridae, Polydnaviruses, Polyomaviridae, Poxviridae, Sphaerolipoviridae, and Tectiviridae.

[0082] In some embodiments, the single-stranded (ssDNA) virus is from the family: Anelloviridae, Bacillariodnaviridae, Bidnaviridae, Circoviridae, Geminiviridae, Inoviridae, Microviridae, Nanoviridae, Parvoviridae, and Spiraviridae.

[0083] A DNA virus that contains both ss and ds DNA regions can be from the group of pleolipoviruses. In some embodiments, the pleolipoviruses include Haloarcula hispanica pleomorphic virus 1, Halogeometricum pleomorphic virus 1, Halorubrum pleomorphic virus 1, Halorubrum pleomorphic virus 2, Halorubrum pleomorphic virus 3, and Halorubrum pleomorphic virus 6.

[0084] In some embodiments, the dsRNA virus is from the family: Birnaviridae, Chrysoviridae, Cystoviridae, Endornaviridae, Hypoviridae, Megavirnaviridae, Partitiviridae, Picobirnaviridae, Reoviridae, Rotavirus and Totiviridae.

[0085] In some embodiments, the positive-sense ssRNA virus can be from the family: Alphaflexiviridae, Alphatetraviridae, Alvernaviridae, Arteriviridae, Astroviridae, Barnaviridae, Betaflexiviridae, Bromoviridae, Caliciviridae, Carmotetraviridae, Closteroviridae, Coronaviridae, Dicistroviridae, Flaviviridae, Gammaflexiviridae, Iflaviridae, Leviviridae, Luteoviridae, Marnaviridae, Mesoniviridae, Narnaviridae, Nodaviridae, Permutotetraviridae, Picornaviridae, Potyviridae, Roniviridae, Secoviridae, Togaviridae, Tombusviridae, Tymoviridae, and Virgaviridae.

[0086] In some embodiments, the negative-sense ssRNA virus can be from the family: Bornaviridae, Filoviridae, Paramyxoviridae, Rhabdoviridae, Nyamiviridae, Arenaviridae, Bunyaviridae, Ophioviridae, and Orthomyxoviridae.

[0087] Non-limiting examples of viruses include: Abelson leukemia virus, Abelson murine leukemia virus, Abelson's virus, Acute laryngotracheobronchitis virus, Adelaide River virus, Adeno associated virus group, Adenovirus, African horse sickness virus, African swine fever virus, AIDS virus, Aleutian mink disease parvovirus, Alpharetrovirus, Alphavirus, ALV related virus, Amapari virus, Aphthovirus, Aquareovirus, Arbovirus, Arbovirus C, arbovirus group A, arbovirus group B, Arenavirus group, Argentine hemorrhagic fever virus, Argentine hemorrhagic fever virus, Arterivirus, Astrovirus, Ateline herpesvirus group, Aujezky's disease virus, Aura virus, Ausduk disease virus, Australian bat lyssavirus, Aviadenovirus, avian erythroblastosis virus, avian infectious bronchitis virus, avian leukemia virus, avian leukosis virus, avian lymphomatosis virus, avian myeloblastosis virus, avian paramyxovirus, avian pneumoencephalitis virus, avian reticuloendotheliosis virus, avian sarcoma virus, avian type C retrovirus group, Avihepadnavirus, Avipoxvirus, B virus, B19 virus, Babanki virus, baboon herpesvirus, baculovirus, Barmah Forest virus, Bebaru virus, Berrimah virus, Betaretrovirus, Birnavirus, Bittner virus, BK virus, Black Creek Canal virus, bluetongue virus, Bolivian hemorrhagic fever virus, Boma disease virus, border disease of sheep virus, borna virus, bovine alphaherpesvirus 1, bovine alphaherpesvirus 2, bovine coronavirus, bovine ephemeral fever virus, bovine immunodeficiency virus, bovine leukemia virus, bovine leukosis virus, bovine mammillitis virus, bovine papillomavirus, bovine papular stomatitis virus, bovine parvovirus, bovine syncytial virus, bovine type C oncovirus, bovine viral diarrhea virus, Buggy Creek virus, bullet shaped virus group, Bunyamwera virus supergroup, Bunyavirus, Burkitt's lymphoma virus, Bwamba Fever, CA virus, Calicivirus, California encephalitis virus, camelpox virus, canarypox virus, canid herpesvirus, canine coronavirus, canine distemper virus, canine herpesvirus, canine minute virus, canine parvovirus, Cano Delgadito virus, caprine arthritis virus, caprine encephalitis virus, Caprine Herpes Virus, Capripox virus, Cardiovirus, caviid herpesvirus 1, Cercopithecid herpesvirus 1, cercopithecine herpesvirus 1, Cercopithecine herpesvirus 2, Chandipura virus, Changuinola virus, channel catfish virus, Charleville virus, chickenpox virus, Chikungunya virus, chimpanzee herpesvirus, chub reovirus, chum salmon virus, Cocal virus, Coho salmon reovirus, coital exanthema virus, Colorado tick fever virus, Coltivirus, Columbia SK virus, common cold virus, contagious eethyma virus, contagious pustular dermatitis virus, Coronavirus, Corriparta virus, coryza virus, cowpox virus, coxsackie virus, CPV (cytoplasmic polyhedrosis virus), cricket paralysis virus, Crimean-Congo hemorrhagic fever virus, croup associated virus, Cryptovirus, Cypovirus, Cytomegalovirus, cytomegalovirus group, cytoplasmic polyhedrosis virus, deer papillomavirus, deltaretrovirus, dengue virus, Densovirus, Dependovirus, Dhori virus, diploma virus, Drosophila C virus, duck hepatitis B virus, duck hepatitis virus 1, duck hepatitis virus 2, duovirus, Duvenhage virus, Deformed wing virus DWV, eastern equine encephalitis virus, eastern equine encephalomyelitis virus, EB virus, Ebola virus, Ebola-like virus, echo virus, echovirus, echovirus 10, echovirus 28, echovirus 9, ectromelia virus, EEE virus, EIA virus, EIA virus, encephalitis virus, encephalomyocarditis group virus, encephalomyocarditis virus, Enterovirus, enzyme elevating virus, enzyme elevating virus (LDH), epidemic hemorrhagic fever virus, epizootic hemorrhagic disease virus, Epstein-Barr virus, equid alphaherpesvirus 1, equid alphaherpesvirus 4, equid herpesvirus 2, equine abortion virus, equine arteritis virus, equine encephalosis virus, equine infectious anemia virus, equine morbillivirus, equine rhinopneumonitis virus, equine rhinovirus, Eubenangu virus, European elk papillomavirus, European swine fever virus, Everglades virus, Eyach virus, felid herpesvirus 1, feline calicivirus, feline fibrosarcoma virus, feline herpesvirus, feline immunodeficiency virus, feline infectious peritonitis virus, feline leukemia/sarcoma virus, feline leukemia virus, feline panleukopenia virus, feline parvovirus, feline sarcoma virus, feline syncytial virus, Filovirus, Flanders virus, Flavivirus, foot and mouth disease virus, Fort Morgan virus, Four Corners hantavirus, fowl adenovirus 1, fowlpox virus, Friend virus, Gammaretrovirus, GB hepatitis virus, GB virus, German measles virus, Getah virus, gibbon ape leukemia virus, glandular fever virus, goatpox virus, golden shinner virus, Gonometa virus, goose parvovirus, granulosis virus, Gross' virus, ground squirrel hepatitis B virus, group A arbovirus, Guanarito virus, guinea pig cytomegalovirus, guinea pig type C virus, Hantaan virus, Hantavirus, hard clam reovirus, hare fibroma virus, HCMV (human cytomegalovirus), hemadsorption virus 2, hemagglutinating virus of Japan, hemorrhagic fever virus, hendra virus, Henipaviruses, Hepadnavirus, hepatitis A virus, hepatitis B virus group, hepatitis C virus, hepatitis D virus, hepatitis delta virus, hepatitis E virus, hepatitis F virus, hepatitis G virus, hepatitis nonA nonB virus, hepatitis virus, hepatitis virus (nonhuman), hepatoencephalomyelitis reovirus 3, Hepatovirus, heron hepatitis B virus, herpes B virus, herpes simplex virus, herpes simplex virus 1, herpes simplex virus 2, herpesvirus, herpesvirus 7, Herpesvirus ateles, Herpesvirus hominis, Herpesvirus infection, Herpesvirus saimiri, Herpesvirus suis, Herpesvirus varicellae, Highlands J virus, Hirame rhabdovirus, hog cholera virus, human adenovirus 2, human alphaherpesvirus 1, human alphaherpesvirus 2, human alphaherpesvirus 3, human B lymphotropic virus, human betaherpesvirus 5, human coronavirus, human cytomegalovirus group, human foamy virus, human gammaherpesvirus 4, human gammaherpesvirus 6, human hepatitis A virus, human herpesvirus 1 group, human herpesvirus 2 group, human herpesvirus 3 group, human herpesvirus 4 group, human herpesvirus 6, human herpesvirus 8, human immodeficiency virus, human immodeficiency virus 1, human immunodeficiency virus 2, human papillomavirus, human T cell leukemia virus, human T cell leukemia virus I, human T cell leukemia virus II, human T cell leukemia virus III, human T cell lymphoma virus I, human T cell lymphoma virus II, human T cell lymphotropic virus type 1, human T cell lymphotropic virus type 2, human T lymphotropic virus I, human T lymphotropic virus II, human T lymphotropic virus III, Ichnovirus, infantile gastroenteritis virus, infectious bovine rhinotracheitis virus, infectious haematopoietic necrosis virus, infectious pancreatic necrosis virus, influenza virus A, influenza virus B, influenza virus C, influenza virus D, influenza virus pr8, insect iridescent virus, insect virus, iridovirus, Japanese B virus, Japanese encephalitis virus, JC virus, Junin virus, Kaposi's sarcoma-associated herpesvirus, Kemerovo virus, Kilham's rat virus, Klamath virus, Kolongo virus, Korean hemorrhagic fever virus, kumba virus, Kysanur forest disease virus, Kyzylagach virus, La Crosse virus, lactic dehydrogenase elevating virus, lactic dehydrogenase virus, Lagos bat virus, Langur virus, lapine parvovirus, Lassa fever virus, Lassa virus, latent rat virus, LCM virus, Leaky virus, Lentivirus, Leporipoxvirus, leukemia virus, leukovirus, lumpy skin disease virus, lymphadenopathy associated virus, Lymphocryptovirus, lymphocytic choriomeningitis virus, lymphoproliferative virus group, Machupo virus, mad itch virus, mammalian type B oncovirus group, mammalian type B retroviruses, mammalian type C retrovirus group, mammalian type D retroviruses, mammary tumor virus, Mapuera virus, Marburg virus, Marburg-like virus, Mason Pfizer monkey virus, Mastadenovirus, Mayaro virus, ME virus, measles virus, Menangle virus, Mengo virus, Mengovirus, Middelburg virus, milkers nodule virus, mink enteritis virus, minute virus of mice, MLV related virus, MM virus, Mokola virus, Molluscipoxvirus, Molluscum contagiosum virus, monkey B virus, monkeypox virus, Mononegavirales, Morbillivirus, Mount Elgon bat virus, mouse cytomegalovirus, mouse encephalomyelitis virus, mouse hepatitis virus, mouse K virus, mouse leukemia virus, mouse mammary tumor virus, mouse minute virus, mouse pneumonia virus, mouse poliomyelitis virus, mouse polyomavirus, mouse sarcoma virus, mousepox virus, Mozambique virus, Mucambo virus, mucosal disease virus, mumps virus, murid betaherpesvirus 1, murid cytomegalovirus 2, murine cytomegalovirus group, murine encephalomyelitis virus, murine hepatitis virus, murine leukemia virus, murine nodule inducing virus, murine polyomavirus, murine sarcoma virus, Muromegalovirus, Murray Valley encephalitis virus, myxoma virus, Myxovirus, Myxovirus multiforme, Myxovirus parotitidis, Nairobi sheep disease virus, Nairovirus, Nanirnavirus, Nariva virus, Ndumo virus, Neethling virus, Nelson Bay virus, neurotropic virus, New World Arenavirus, newborn pneumonitis virus, Newcastle disease virus, Nipah virus, noncytopathogenic virus, Norwalk virus, nuclear polyhedrosis virus (NPV), nipple neck virus, O'nyong'nyong virus, Ockelbo virus, oncogenic virus, oncogenic viruslike particle, oncornavirus, Orbivirus, Orf virus, Oropouche virus, Orthohepadnavirus, Orthomyxovirus, Orthopoxvirus, Orthoreovirus, Orungo, ovine papillomavirus, ovine catarrhal fever virus, owl monkey herpesvirus, Palyam virus, Papillomavirus, Papillomavirus sylvilagi, Papovavirus, parainfluenza virus, parainfluenza virus type 1, parainfluenza virus type 2, parainfluenza virus type 3, parainfluenza virus type 4, Paramyxovirus, Parapoxvirus, paravaccinia virus, Parvovirus, Parvovirus B19, parvovirus group, Pestivirus, Phlebovirus, phocine distemper virus, Picodnavirus, Picornavirus, pig cytomegalovirus-pigeonpox virus, Piry virus, Pixuna virus, pneumonia virus of mice, Pneumovirus, poliomyelitis virus, poliovirus, Polydnavirus, polyhedral virus, polyoma virus, Polyomavirus, Polyomavirus bovis, Polyomavirus cercopitheci, Polyomavirus hominis 2, Polyomavirus maccacae 1, Polyomavirus muris 1, Polyomavirus muris 2, Polyomavirus papionis 1, Polyomavirus papionis 2, Polyomavirus sylvilagi, Pongine herpesvirus 1, porcine epidemic diarrhea virus, porcine hemagglutinating encephalomyelitis virus, porcine parvovirus, porcine transmissible gastroenteritis virus, porcine type C virus, pox virus, poxvirus, poxvirus variolae, Prospect Hill virus, Provirus, pseudocowpox virus, pseudorabies virus, psittacinepox virus, quailpox virus, rabbit fibroma virus, rabbit kidney vaculolating virus, rabbit papillomavirus, rabies virus, raccoon parvovirus, raccoonpox virus, Ranikhet virus, rat cytomegalovirus, rat parvovirus, rat virus, Rauscher's virus, recombinant vaccinia virus, recombinant virus, reovirus, reovirus 1, reovirus 2, reovirus 3, reptilian type C virus, respiratory infection virus, respiratory syncytial virus, respiratory virus, reticuloendotheliosis virus, Rhabdovirus, Rhabdovirus carpia, Rhadinovirus, Rhinovirus, Rhizidiovirus, Rift Valley fever virus, Riley's virus, rinderpest virus, RNA tumor virus, Ross River virus, Rotavirus, rougeole virus, Rous sarcoma virus, rubella virus, rubeola virus, Rubivirus, Russian autumn encephalitis virus, SA 11 simian virus, SA2 virus, Sabia virus, Sagiyama virus, Saimirine herpesvirus 1, salivary gland virus, sandfly fever virus group, Sandjimba virus, SARS virus, SDAV (sialodacryoadenitis virus), sealpox virus, Semliki Forest Virus, Seoul virus, sheeppox virus, Shope fibroma virus, Shope papilloma virus, simian foamy virus, simian hepatitis A virus, simian human immunodeficiency virus, simian immunodeficiency virus, simian parainfluenza virus, simian T cell lymphotrophic virus, simian virus, simian virus 40, Simplexvirus, Sin Nombre virus, Sindbis virus, smallpox virus, South American hemorrhagic fever viruses, sparrowpox virus, Spumavirus, squirrel fibroma virus, squirrel monkey retrovirus, SSV 1 virus group, STLV (simian T lymphotropic virus) type I, STLV (simian T lymphotropic virus) type II, STLV (simian T lymphotropic virus) type III, stomatitis papulosa virus, submaxillary virus, suid alphaherpesvirus 1, suid herpesvirus 2, Suipoxvirus, swamp fever virus, swinepox virus, Swiss mouse leukemia virus, TAC virus, Tacaribe complex virus, Tacaribe virus, Tanapox virus, Taterapox virus, Tench reovirus, Theiler's encephalomyelitis virus, Theiler's virus, Thogoto virus, Thottapalayam virus, Tick borne encephalitis virus, Tioman virus, Togavirus, Torovirus, tumor virus, Tupaia virus, turkey rhinotracheitis virus, turkeypox virus, type C retroviruses, type D oncovirus, type D retrovirus group, ulcerative disease rhabdovirus, Una virus, Uukuniemi virus group, vaccinia virus, vacuolating virus, varicella zoster virus, Varicellovirus, Varicola virus, variola major virus, variola virus, Vasin Gishu disease virus, VEE virus, Venezuelan equine encephalitis virus, Venezuelan equine encephalomyelitis virus, Venezuelan hemorrhagic fever virus, vesicular stomatitis virus, Vesiculovirus, Vilyuisk virus, viper retrovirus, viral haemorrhagic septicemia virus, Visna Maedi virus, Visna virus, volepox virus, VSV (vesicular stomatitis virus), Wallal virus, Warrego virus, wart virus, WEE virus, West Nile virus, western equine encephalitis virus, western equine encephalomyelitis virus, Whataroa virus, Winter Vomiting Virus, woodchuck hepatitis B virus, woolly monkey sarcoma virus, wound tumor virus, WRSV virus, Yaba monkey tumor virus, Yaba virus, Yatapoxvirus, yellow fever virus, and the Yug Bogdanovac virus.

[0088] In some embodiments, the virus is a coronavirus. In some embodiments, the coronavirus can be selected from the group consisting of: alphacoronavirus, betacoronavirus, deltacoronavirus, and gammacoronavirus. Examples of alphacoronavirus can include, but are not limited to, Bat coronavirus CDPHE15, Bat coronavirus HKU10, Human coronavirus 229E, Human coronavirus NL63, Miniopterus bat coronavirus 1, Miniopterus bat coronavirus HKU8, Mink coronavirus 1, Porcine epidemic diarrhea virus, Rhinolophus bat coronavirus HKU2, and Scotophilus bat coronavirus 512. Examples of betacoronavirus can include, but are not limited to, Betacoronavirus 1, Hedgehog coronavirus 1, Human coronavirus HKU1, Middle East respiratory syndrome-related coronavirus, Murine coronavirus, Pipistrellus bat coronavirus HKU5, Rousettus bat coronavirus HKU9, Severe acute respiratory syndrome-related coronavirus, Tylonycteris bat coronavirus HKU4. Examples of deltacoronavirus can include, but are not limited to, Bulbul coronavirus HKU11, Common moorhen coronavirus HKU21, Coronavirus HKU15, Munia coronavirus HKU13, Night heron coronavirus HKU19, Thrush coronavirus HKU12, White-eye coronavirus HKU16, Wigeon coronavirus HKU20. Examples of gammacoronavirus can include, but are not limited to, Avian coronavirus, Beluga whale coronavirus SW1. Additional examples of coronavirus can include MERS-CoV, SARS-CoV, and SARS-CoV-2. In some embodiments, the coronavirus can be SARS-CoV-2.

[0089] In some embodiments, the pathogen can: be easily disseminated or transmitted from person to person; result in high mortality rates and have the potential for major public health impact; and cause public panic and social disruption; and require special action for public health preparedness. Example of these pathogens can include Anthrax (Bacillus anthracis), Botulism (Clostridium botulinum toxin), Plague (Yersinia pestis), Smallpox (variola major), Tularemia (Francisella tularensis), or Viral hemorrhagic fevers, including Filoviruses (Ebola, Marburg) and Arenaviruses (Lassa, Machupo).

[0090] In some embodiments, the pathogen can: be moderately easy to disseminate; result in moderate morbidity rates and low mortality rates; and require specific enhancements of diagnostic capacity and enhanced disease surveillance. Example of these pathogens can include Brucellosis (Brucella species), Epsilon toxin of Clostridium perfringens, Food safety threats (e.g., Salmonella species, Escherichia coli O157:H7, or Shigella), Glanders (Burkholderia mallei), Melioidosis (Burkholderia pseudomallei), Psittacosis (Chlamydia psittaci), Q fever (Coxiella burnetii), Ricin toxin from Ricinus communis (castor beans), Staphylococcal enterotoxin B, Typhus fever (Rickettsia prowazekii), Viral encephalitis (alphaviruses, such as eastern equine encephalitis, Venezuelan equine encephalitis, and western equine encephalitis), or Water safety threats (e.g., Vibrio cholerae and Cryptosporidium parvum).

[0091] In some embodiments, the pathogen is an emerging pathogen with a sequence that is not yet identified. In some embodiments, the emerging pathogen has a potential for high morbidity and mortality rates and major health impact. Example of these pathogens can include Nipah virus and hantavirus.

[0092] In some embodiments, the pathogen can comprise a toxin. In some embodiments, the toxin can be secreted by any one of the pathogen described herein.

[0093] In some embodiments, the pathogen comprise a bacterium. In some embodiments, the bacterium may be a Gram-positive bacterium. In some embodiments, the bacterium is a Gram-negative bacterium. In some embodiments, the bacterium is a strain that is resistant to β-lactamase In some embodiments, the antigen is derived from Enterotoxigenic Escherichia coli (ETEC), Shiga toxin-producing Escherichia coli (STEC), Campylobacter jejuni, Pseudomonas aeruginosa, Acinetobacter baumannii, Streptococcus mutans, Helicobacter pylori, or Bacillus anthracis.

[0094] Exemplary list of pathogens and the diseases or conditions associated with these pathogens that can be treated with the enucleated cell, the composition, or the pharmaceutical composition described herein can be found in Tables 3-6.

TABLE 3
Exemplary virus and viral disease that may be treated or
vaccinated by the cytoplast

| Target | Disease |
|---|---|
| Respiratory syncytial virus (RSV) | RSV Infection |
| Rhesus monkey rotavirus (RV) | RV-induced diarrhea |
| Rhesus monkey RV serotype G3, | RV-induced diarrhea |
| strain RRV | |
| P domain VP1 capsid protein | Norovirus |
| H5 hemagglutinin | H5N1 influenza |
| HA1 hemagglutinin | H5N2 influenza |
| Nucleoprotein | Influenza A |
| Nsp9 | Porcine reproductive and |
| | respiratory syndrome |
| | virus (PRRSV) |
| Hepatitis C (HCV) E2 | HCV |
| glycoprotein | |
| NS3/4A | HCV genotype 3a |
| Retrovirus (Rev) | HIV-1 |
| CXCR4 | HIV-1 |
| Human glycophorin A | HIV (diagnostics) |
| HIV-1 Nef | HIV-1 |
| Nucleoprotein | Ebolavirus (diagnostics biothreat |
| | assays: MARSA) |
| Nucleoprotein prNΔ85 | Hantavirus (diagnostics) |
| H5N1 Influenza | H5N1 Influenza (diagnostics) |
| H3N2 | H3N2 Influenza (diagnostics) |
| HIV-1 virion infectivity | HIV monitoring (diagnostics) |
| factor (Vif) | |

TABLE 4
Exemplary bacterium and bacterial disease that may be treated or
vaccinated by the cytoplast

| Target | Disease |
|---|---|
| Lectin domain F18 fimbriae | Enterotoxigenic Escherichia coli |
| | (ETEC) and Shiga toxin-producing |
| | Escherichia coli (STEC) |
| F4 fimbriae | ETEC |
| FeaGac Adhesin of F4 fimbriae | ETEC |
| Flagella | Campylobacter jejuni |
| Flagella | Pseudomonas aeruginosa |
| Biofilm-associated protein | Acinetobacter baumannii |
| Streptococcus mutans strain | Streptococcus. mutans |
| HG982 | |
| TssM protein of type VI | Gram-negative bacteria |
| secretion system | |
| TEM-1 and Bcll ß-lactamase | ß-lactamase-resistant bacterial strains |
| UreC subunit of urease | Helicobacter pylori |

TABLE 5
Exemplary parasite and fungus and parasite and fungal disease
that may be treated or vaccinated by the cytoplast

| Target | Disease |
|---|---|
| VSG | Trypanosoma brucei |
| VSG | Human African Trypanosoma |
| Paraflagellar rod protein | Detection of all trypanosoma species |
| | (diagnostics) |
| Cell wall protein Malf1 | Malassezia furfur |
| Myosin tail interaction protein | Plasmodium falciparum |

TABLE 6
Exemplary toxin and toxin disease that may be treated
or vaccinated by the cytoplast

| Target | Disease |
|---|---|
| Toxic venom fractions: Aahl′ and | Androctonus australis hector |
| Aahll | (Aah) scorpion venom |
| HNc | Hemiscorpius lepturus |
| | scorpion venom |
| α-Cobratoxin | Naja kaouthia venom |
| RTA/RTB subunits | Ricin |
| CDTa toxin | Clostridium difficile |
| CDTa/CDTb toxin | C. difficile |
| LPS derived from | N. meningitidis |
| Neisseria meningitidis | |
| Staphylococcal enterotoxin B | Toxin of Cholera |
| Anthrax | Bacillus anthracis |
| Shiga toxin 1 and 2 | Shiga toxin-producing |
| | Escherichia coli |
| Botulinum neurotoxin A and E | Clostridium botulinum |
| ADP-ribosylating toxin | Salmonella typhimurium |
| Tetanus toxin and CD11b/CD18 | Clostridium tetani |
| (mac-1) | |

[0095] C. Active Agents

[0096] The cytoplasts of the present disclosure express or contain an active agent, such an anti-viral composition (e.g., vaccine, neutralizing antibodies against a pathogen). A active agent can comprise at least one of a therapeutic DNA molecule, a therapeutic RNA molecule, a therapeutic protein (e.g., an enzyme, an antibody, an antigen, a toxin, cytokine, a protein hormone, a growth factor, a cell surface receptor, or a vaccine), a therapeutic peptide (e.g., a peptide hormone or an antigen), a small molecule active agent (e.g., a steroid, a polyketide, an alkaloid, a toxin, an antibiotic, an antiviral, a colchicine, a taxol, a mitomycin, or emtansine), and a therapeutic gene editing factor. In some embodiments, a cytoplast can be engineered to produce (e.g., express, and in some embodiments, secrete) at least one of a therapeutic DNA molecule, a therapeutic RNA molecule, a therapeutic protein, a therapeutic peptide, a therapeutic small molecule, or a therapeutic gene editing component. Alternatively, or in addition, the nucleated cell (the “parent” cell as used herein) may be engineered to produce at least one of a therapeutic DNA molecule, a therapeutic RNA molecule, a therapeutic protein, a therapeutic peptide, a small molecule active agent, and a gene editing factor, prior to enucleation into a cytoplast.

[0097] The therapeutic DNA molecule, a therapeutic RNA molecule, a therapeutic protein, a therapeutic peptide, a small molecule active agent, or a therapeutic gene editing factor can include a targeting moiety. Non-limiting exemplary targeting moieties that can be produced by or contained in a cytoplast include chemokine receptors, adhesion molecules, and antigens.

[0098] A cytoplast of the present disclosure may be administered to a subject, and may contain a therapeutic DNA molecule, a therapeutic RNA molecule, a therapeutic protein (e.g., an enzyme, an antibody, an antigen, a toxin, cytokine, a protein hormone, a growth factor, a cell surface receptor, or a vaccine, or any therapeutic protein that is currently available or in development), a therapeutic peptide (e.g., a peptide hormone or an antigen, or any therapeutic peptide that is currently available or in development), a small molecule active agent (e.g., a steroid, a polyketide, an alkaloid, a toxin, an antibiotic, an antiviral, an analgesic, an anticoagulant, an antidepressant, an anticancer drug, an antiepileptic, an antipsychotic, a sedative, a colchicine, a taxol, a mitomycin, emtansine, or any small molecule active agent that is currently available or in development), a therapeutic gene editing factor, a therapeutic nanoparticle, or another active agent (e.g., bacteria, bacterial spores, bacteriophages, bacterial components, viruses (e.g., oncolytic viruses), exosomes, lipids, or ions). Non-limiting examples of oncolytic viruses include Talimogene laherparepvec, Onyx-015, GL-ONC1, CV706, Voyager-V1, and HSV-1716. Some wild-type viruses also show oncolytic behavior, such as Vaccinia virus, Vesicular stomatitis virus, Poliovirus, Reovirus, Senecavirus, ECHO-7, and Semliki Forest virus.

[0099] In some embodiments, the DNA molecule, the RNA molecule, the protein, the peptide, the small molecule active agent, and/or the gene-editing factor are recombinantly expressed. In some embodiments, the cell from which the cytoplast is derived or obtained is engineered to produce one or more of the DNA molecule, the RNA molecule, the protein, the peptide, the small molecule active agent, and/or the gene-editing factor. In some embodiments, the cell from which the cytoplast is derived or obtained is engineered to stably (e.g., permanently) express one or more of the DNA molecule, the RNA molecule, the protein, the peptide, the small molecule active agent, and/or the gene-editing factor. In some embodiments, the cell from which the cytoplast is derived or obtained is engineered to transiently express one or more of the DNA molecule, the RNA molecule, the protein, the peptide, the small molecule active agent, and/or the gene-editing factor. In some embodiments, the cell from which the cytoplast is derived or obtained is engineered prior to enucleation. In some embodiments, the cytoplast is engineered to transiently express one or more of the DNA molecule, the RNA molecule, the protein, the peptide, the small molecule active agent, and/or the gene-editing factor (e.g., engineered following enucleation).

[0100] In some embodiments, DNA molecule, the RNA molecule, the protein, the peptide, the small molecule active agent, and/or the gene-editing factor are not naturally expressed (e.g., in the absence of engineering) in the cell from which the cytoplast was derived or obtained (e.g., the DNA molecule, the RNA molecule, the protein, the peptide, the small molecule active agent, and/or the gene-editing factor are exogenous to the cytoplast). In some embodiments, the DNA molecule, the RNA molecule, the protein, the peptide, the small molecule active agent, and/or the gene-editing factor are not naturally expressed in the subject (e.g., the DNA molecule, the RNA molecule, the protein, the peptide, the small molecule active agent, and/or the gene-editing factor are exogenous to the subject). In some embodiments, the DNA molecule, the RNA molecule, the protein, the peptide, the small molecule active agent, and/or the gene-editing factor are not naturally expressed in the subject at the intended site of therapy (e.g., a tumor, or a particular tissue, such as the brain, the intestine, the lungs, the heart, the liver, the spleen, the pancreas, muscles, eyes, and the like) (e.g., the DNA molecule, the RNA molecule, the protein, the peptide, the small molecule active agent, and/or the gene-editing factor are exogenous to the intended site of therapy).

[0101] In some embodiments, the DNA molecule, the RNA molecule, the protein, the peptide, the small molecule active agent, and/or the gene-editing factor are naturally expressed (e.g., in the absence of engineering) in the cell from which the cytoplast was derived or obtained (e.g., the DNA molecule, the RNA molecule, the protein, the peptide, the small molecule active agent, and/or the gene-editing factor are innately endogenous to the cytoplast) (e.g., in the absence of engineering of the cell from which the cytoplast was derived or obtained). In some embodiments, the DNA molecule, the RNA molecule, the protein, the peptide, the small molecule active agent, and/or the gene-editing factor are naturally expressed in the subject (e.g., the DNA molecule, the RNA molecule, the protein, the peptide, the small molecule active agent, and/or the gene-editing factor are endogenous to the subject). In some embodiments, the DNA molecule, the RNA molecule, the protein, the peptide, the small molecule active agent, and/or the gene-editing factor are naturally expressed in the subject at the intended site of therapy (e.g., a tumor, or a particular tissue, such as the brain, the intestine, the lungs, the heart, the liver, the spleen, the pancreas, muscles, eyes, and the like) (e.g., the DNA molecule, the RNA molecule, the protein, the peptide, the small molecule active agent, and/or the gene-editing factor are endogenous to the intended site of therapy).

[0102] In some embodiments, therapeutic, e.g., the DNA molecule, the RNA molecule, the protein, the peptide, the small molecule active agent, and/or the gene-editing factor, is derived from a synthetic cell and loaded into the cytoplast.

[0103] In some embodiments, the cytoplast expresses a corrected, a truncated, or a non-mutated version and/or copy of the DNA molecule, the RNA molecule, the protein, the peptide, the small molecule active agent, and/or the gene-editing factor as compared to the cell from which the cytoplast was derived or obtained. In some embodiments, the cytoplast is obtained from any nucleated cell (e.g., a eukaryotic cell, a mammalian cell (e.g., a human cell, or any mammalian cell described herein), a protozoal cell (e.g., an amoeba cell), an algal cell, a plant cell, a fungal cell, an invertebrate cell, a fish cell, an amphibian cell, a reptile cell, or a bird cell).

[0104] In some embodiments, a cytoplast produces or contains at least 2 (e.g., at least 2, 3, 4, 5, or more) different therapeutic DNA molecules, therapeutic RNA molecules, therapeutic proteins, therapeutic peptides, small molecule active agent s, or therapeutic gene-editing factors, in any combination. For example, in some embodiments, a cytoplast can produce or contain a therapeutic DNA molecule and a small molecule active agent. For example, in some embodiments, a cytoplast can produce or contain two different small molecule active agent s. For example, in some embodiments, a cytoplast can produce or contain a chemokine receptor (e.g., for targeting) and a small molecule active agent.

[0105] In some embodiments, the therapeutic RNA molecule is messenger RNA (mRNA), short hairpin RNA (shRNA), small interfering RNA (siRNA), microRNA, long non-coding RNA (lncRNA) or a RNA virus. In some embodiments, the therapeutic DNA molecule is single-stranded DNA, double-stranded DNA, an oligonucleotide, a plasmid, a bacterial DNA molecule or a DNA virus. In some embodiments, the therapeutic protein is a cytokine, a growth factor, a hormone, an antibody, a small-peptide based drug, or an enzyme. In some embodiments, the cytoplast transiently expresses the therapeutic DNA molecule, the therapeutic RNA molecule, the therapeutic protein, the therapeutic peptide, the small molecule therapeutic, and/or the therapeutic gene editing factor. In some embodiments, the expression of the therapeutic DNA molecule, the therapeutic RNA molecule, the therapeutic protein, the therapeutic peptide, the small molecule therapeutic, and/or the therapeutic gene editing factor is inducible. In some embodiments, a nucleated cell is permanently engineered to express the therapeutic DNA molecule, the therapeutic RNA molecule, the therapeutic protein, the therapeutic peptide, the small molecule therapeutic, and/or the therapeutic gene editing factor. In some embodiments, the expression of the therapeutic DNA molecule, the therapeutic RNA molecule, the therapeutic protein, the therapeutic peptide, the small molecule therapeutic, and/or the therapeutic gene editing factor. In some embodiments of any of the methods described herein, the cytoplast comprises a active agent or a nanoparticle. In some embodiments, the active agent is a small molecule or a bacteria or an exosome.

[0106] For the systemic administration of therapeutic cells, there are two major problems for their successful homing to the diseased tissues. First, most of the cells may be trapped in the small capillaries in the lung or other tissues, which may also cause serious side effects such as pulmonary embolism. Cytoplasts are, in some embodiments, much smaller than their parental cells (e.g., about 60% of the diameter of parental cells and ⅛ the volume) and do not have the rigid nucleus, therefore, cytoplasts can pass better through small capillaries and vessels than their parental cells. Second, the specific homing of cells to the diseased tissues can depend on the chemokine receptor signaling such as SDF-1α/CXCR4, CCL2/CCR2, and the adhesion molecules such as PSGL-1. As shown herein, cytoplasts can be engineered to specifically express functional CXCR4, CCR2 as well as glycosylated PSGL-1, which can greatly promote the specific homing of the engineered cytoplasts.

[0107] In some embodiments, the cytoplasts can further include (e.g. by engineering or from the cell from which they were obtained) a targeting moiety that is expressed on the cell surface of the cytoplast, e.g., CXCR4, CCR2 or PSGL-1. Non-limiting examples of cell surface proteins that may be expressed on the cell surface of the cytoplast include chemokines such as CXCR4, CCR2, CCR1, CCR5, CXCR7, CXCR2, and CXCR1. Other example of cell surface proteins that can be expressed on the cell surface of the cytoplast as homing receptor can include C-X-C chemokine receptor type 3, leukosialin, CD44 antigen, C-C chemokine receptor type 7, L-selectin, lymphocyte function-associated antigen 1, or very late antigen-4, or a combination thereof. In some embodiments, the cytoplasts can further include (e.g. by engineering or from the cell from which they were obtained) a cell targeting moiety that is secreted by the cytoplasts, or is tethered to the extracellular matrix, e.g., SDF1α or CCL2. Non-limiting examples of proteins that may be secreted by the cytoplast for cell homing include: SDF1α, CCL2, CCL3, CCL5, CCL8, CCL1, CXCL9, CXCL10, CCL11, and CXCL12. The targeting moiety may direct the cytoplast to a target cell, target tissue, or target environment. In some embodiments, the targeting moiety directs the cytoplast based on chemokine/chemokine receptor sensing. In some embodiments, the targeting moiety directs the cytoplast based on direct binding. For example, the targeting moiety may comprise an antibody that may bind to an antigen expressed by the target cell.

[0108] In some embodiments, the cytoplasts can express and/or secret at least one of cytokines selected from the group consisting of: 4-1BBL, acylation stimulating protein, adipokine, albinterferon, APRIL, Arh, BAFF, Bcl-6, CCL1, CCL1/TCA3, CCL11, CCL12/MCP-5, CCL13/MCP-4, CCL14, CCL15, CCL16, CCL17/TARC, CCL18, CCL19, CCL2, CCL2/MCP-1, CCL20, CCL21, CCL22/MDC, CCL23, CCL24, CCL25, CCL26, CCL27, CCL28, CCL3, CCL3L3, CCL4, CCL4L1/LAG-1, CCL5, CCL6, CCL7, CCL8, CCL9, CCR10, CCR3, CCR4, CCR5, CCR6, CCR7, CCR8, CD153, CD154, CD178, CD4OLG, CD70, CD95L/CD178, Cerberus (protein), chemokines, CLCF1, CNTF, colony-stimulating factor, common b chain (CD131), common g chain (CD132), CX3CL1, CX3CR1, CXCL1, CXCL10, CXCL11, CXCL12, CXCL13, CXCL14, CXCL15, CXCL16, CXCL17, CXCL2, CXCL2/MIP-2, CXCL3, CXCL4, CXCL5, CXCL6, CXCL7, CXCL9, CXCR3, CXCR4, CXCR5, EDA-A1, Epo, erythropoietin, FAM19A1, FAM19A2, FAM19A3, FAM19A4, FAM19A5, Flt-3L, FMS-like tyrosine kinase 3 ligand, Foxp3, GATA-3, GcMAF, G-CSF, GITRL, GM-CSF, granulocyte colony-stimulating factor, granulocyte-macrophage colony-stimulating factor, hepatocyte growth factor, IFNA1, IFNA10, IFNA13, IFNA14, IFNA2, IFNA4, IFNA5/IFNaG, IFNA7, IFNA8, IFNB1, IFNE, IFNG, IFNZ, IFN-α, IFN-β, IFN-γ, IFNω/IFNW1, IL-1, IL-10, IL-10 family, IL-10-like, IL-11, IL-12, IL-13, IL-14, IL-15, IL-16, IL-17, IL-17 family, IL-17A-F, IL-18, IL-18BP, IL-19, IL-1A, IL-1B, IL-1F10, IL-1F3/IL-1RA, IL-1F5, IL-1F6, IL-1F7, IL-1F8, IL-1F9, IL-1-like, IL-1RA, IL-1RL2, IL-1α, IL-1β, IL-2, IL-20, IL-21, IL-22, IL-23, IL-24, IL-28A, IL-28B, IL-29, IL-3, IL-31, IL-33, IL-35, IL-4, IL-5, IL-6, IL-6-like, IL-7, IL-8/CXCL8, IL-9, inflammasome, interferome, interferon, interferon beta-1a, interferon beta-lb, interferon gamma, interferon type I, interferon type II, interferon type III, interferons, interleukin, interleukin 1 receptor antagonist, Interleukin 8, IRF4, Leptin, leukemia inhibitory factor (LIF), leukocyte-promoting factor, LIGHT, LTA/TNFB, LT-β, lymphokine, lymphotoxin, lymphotoxin alpha, lymphotoxin beta, macrophage colony-stimulating factor, macrophage inflammatory protein, macrophage-activating factor, M-CSF, MEW class III, miscellaneous hematopoietins, monokine, MSP, myokine, myonectin, nicotinamide phosphoribosyltransferase, oncostatin M (OSM), oprelvekin, OX4OL, platelet factor 4, promegapoietin, RANKL, SCF, STAT3, STAT4, STAT6, stromal cell-derived factor 1, TALL-1, TBX21, TGF-α, TGF-β, TGF-β1, TGF-β2, TGF-β3, TNF, TNFSF10, TNFSF11, TNFSF12, TNFSF13, TNFSF14, TNFSF15, TNFSF4, TNFSF8, TNF-α, TNF-β, Tpo, TRAIL, TRANCE, TWEAK, vascular endothelial growth inhibitor, XCL1, or XCL2.

[0109] In some embodiments, the cytoplasts can express and/or secrete at least one cytokine to modulate biological activities of any one of myeloid cell, a T cell such as alpha beta cytotoxic T cell, a gamma delta T cell, a regulatory T cell, a natural killer T cell, a B cell, a natural killer cell, macrophages, mast cells, endothelial cells, fibroblasts, or various stromal cells.

[0110] In some embodiments, the cytoplasts can further include (e.g. by engineering or from the cell from which they were obtained) a surface marker that aids in their evasion of the subject immune system. For example, in some embodiments, the cytoplasts can include a CD47 marker. Without being bound by any particular theory, it is believed that a CD47 marker helps to prevent the cytoplasts from being phagocytosed by macrophages. Non-limiting examples of cell-matrix receptors and cell-cell adhesion molecules include integrins, cadherins, glycoproteins, and heparin sulfate proteoglycans. Non-limiting examples of therapeutic molecules include tumor antigens and immunomodulatory peptides, polyamines, and ATP.

[0111] 1. Vaccine Compositions

[0112] Described herein, in some embodiments, are cytoplasts engineered to express or deliver an active agent that is a vaccine composition. In some embodiments, a nucleic acid molecule encoding the vaccine composition is introduced into the cytoplast, or parent cell thereof, using the methods described herein. In some embodiments, the vaccine composition is expressed in the cytoplast using cell machinery endogenous to the corresponding parent cell (e.g., mRNA translational machinery, protein synthesis). Once administered to the subject, in some embodiments, the cytoplast utilizes endogenous protein secretion machinery of the corresponding parent cell to secrete the vaccine composition into extracellular space. The cytoplasts may also be engineered with homing receptors specific to target tissues in the subject (e.g., lung, lymph) in which the vaccine composition is secreted. The cytoplasts may also be engineered to express immune system activators, such as granulocyte-macrophage colony-stimulating factor (GM-CSF) or any one of the cytokines or receptors for the cytokines described herein.

[0113] In some embodiments, the vaccine composition is against an antigen of a pathogen. Non-limiting examples of antigens include proteins comprising native sequences, polypeptides comprising natural or unnatural amino acids and/or with modifications such as glycosylation, palmitoylation, myristoylation, and the like, and nucleic acids comprising natural or unnatural bases. A pathogen can be any bacteria, virus, or fungus that causes infection in a mammal. In some embodiments, a pathogen can be a virus. In some embodiments, the viral antigen can be prepared from a viral protein, a fragment of a viral protein, or nucleic acid encoding the viral protein or the fragment of the viral protein. In some embodiments, the vaccine comprises an inactivated version of a virus described herein. In some embodiments, the vaccine comprises a live-attenuated version of a virus described herein. A live-attenuated virus, in some embodiments, is a virus that is alive but is replication deficient. A live-attenuated virus, in other cases, is a virus that is alive but is not infectious.

[0114] In some embodiments, the vaccine comprising the cytoplast described herein induces an adaptive immune response in the subject following administered of the cytoplast comprising the vaccine composition to a subject. In some embodiments, the vaccine described herein induce an adaptive immune response that is sufficient to immunize the subject against an infection by the virus, or lessen the severity of a disease or condition caused by an infection by the virus.

[0115] Provided herein, in some embodiments, are cytoplasts engineered to express a vaccine compositions against a viral antigen of a pathogen disclosed herein. The virus can be a DNA virus or an RNA virus. A DNA virus can be a single-stranded (ss) DNA virus, a double-stranded (ds) DNA virus, or a DNA virus that contains both ss and ds DNA regions. An RNA virus can be a single-stranded (ss) RNA virus or a double-stranded (ds) RNA virus. A ssRNA virus can further be classified into a positive-sense RNA virus or a negative-sense RNA virus.

[0116] In some embodiments, the viral antigen is at least or equal to 50%, 60%, 70%, 75%, 80%, 85%, 90%, 95%, or 99% identical to an influenza protein encoded by any, genera, strain, or subtype of influenza. Exemplary influenza genus can include Influenza virus A, Influenza virus B, Influenza virus C, and Influenza virus D. In some embodiments, the cytoplast described herein can be engineered to express a combination of influenza viral proteins of hemagglutinin (HA) and neuraminidase (NA). Influenza hemagglutinin (HA) that can be expressed by the cytoplast described herein can include HA subtype H1, H2, H3, H4, H5, H6, H7, H8, H9, H10, H11, H12, H13, H14, H15, H16, H17, or H18. Influenza neuraminidase (NA) that can be expressed by the cytoplast described herein can include NA subtype N1, N2, N3, N4, N5, N6, N7, N8, N9, N10, or N11. In some embodiments, the cytoplast described herein can express a combination of any one of the HA and NA subtype described herein. Exemplary combination that can be expressed by one a single cytoplast can include H1N1, H2N2, H3N2, H5N1, H7N7, H1N2, H9N2, H7N2, H7N3, H10N7, H7N9, or H6N1. Other additional exemplary combination can include H1N1, H1N2, H1N3, H1N4, H1N5, H1NG, H1N7, H1N8, H1N9, H1N10, H1N11, H2N1, H2N2, H2N3, H2N4, H2N5, H2NG, H2N7, H2N8, H2NB, H2N1D, H2N11, H3N1, H3N2, H3N3, H3N4, H3N5, H3NB, H3N7, H3N8, H3NB, H3N1D, H3N11, H4N1, H4N2, H4N3, H4N4, H4N5, H4NB, H4N7, H4N8, H4N9, H4N10, H4N11, H5N1, H5N2, H5N3, H5N4, H5N5, H5NB, H5N7, H5N8, H5N3, H5N1D, H5N11, HBN1, HBN2, HBN3, HBN4, HBN5, HBNB, HBN7, HBN8, HBN9, HBN10, HBN11, H7N1, H7N2, H7N3, H7N4, H7N5, H7NB, H7N7, H7N8, H7N9, H7N10, H7N11, H8N1, H8N2, H8N3, H8N4, H8N5, H8NG, H8N7, H8N8,5 H8N9, H8N10, HBN11, HBN1, H9N2, HBN3, H9N4, H3N5, H3N7, H3N8, H3N3, H9N1D, HBN11, H1DN1, H10N2, H1DN3, H1DN4, H1DN5, H1DNG, H1DN7, H1DN8, H1DN3, H10N10, H1DN11, H11N1, H11N2, H11N3, H11N4, H11N5, HUNG, H11N7, HUNS, H11NS, H11N10, H11N11, H12N1, H12N2, H12N3, H12N4, H12N5, H12NB, H12N7, H12N8, H12N3, H12N1D, H12N11, H13N1, H13N2, H13N3, H13N4, H13N5, H13NB, H13N7, H13N8, H13N3, H13N1D, H13N11, H14N1, H14N2, H14N3, H14N4, H14N5, H14NB, H14N7, H14N8, H14N9, H14N10, H14N11, H15N1, H15N2, H15N3, H15N4, H15N5, H15NB, H15N7, H15N8, H15N3, H15N1D, H15N11, H1BN1, H1BN2, H1BN3, H1BN4, H1BN5, H1BNB, H1BN7, H1BN8, H1GN3, H1BN10, H1BN11, H17N1, H17N2, H17N3, H17N4, H17N5, H17NB, H17N7, H17N8, H17N3, H17N10, H17N11, H1BN1, H18N2, H18N3, H18N4, H18N5, H1BNB, H18N7, H18N8, H18N3, H1BN10, or H1BN11.

[0117] Provided herein, in some embodiments, are cytoplasts engineered to express a vaccine composition against a bacterial antigen. In some embodiments, the bacterial antigen is derived from anthrax (Bacillus anthracis), Botulism (Clostridium botulinum toxin), plague (Yersinia pestis), tularemia (Francisella tularensis), Brucellosis (Brucella species), epsilon toxin of Clostridium perfringens, salmonella species, Escherichia coli O 157:H7, Shigella, Glanders (Burkholderia mallei), Melioidosis (Burkholderia pseudomallei), Psittacosis (Chlamydia psittaci), Q fever (Coxiella burnetii), Staphylococcal enterotoxin B, Typhus fever (Rickettsia prowazekii) Vibrio cholerae, Cryptosporidium parvum. In some embodiments, the cytoplasts are engineered to express a vaccine composition against Ricin toxin from Ricinus communis (castor beans).

[0118] Provided herein, in some embodiments, are cytoplasts engineered to express a vaccine compositions against a tumor antigen. A “tumor antigen” as used herein refers to an antigen produced by a cancer cell. Non-limiting examples of cancer cell or tumor cell, as used in the present disclosure, can include cell of cancer including Acanthoma, Acinic cell carcinoma, Acoustic neuroma, Acral lentiginous melanoma, Acrospiroma, Acute eosinophilic leukemia, Acute lymphoblastic leukemia, Acute megakaryoblastic leukemia, Acute monocytic leukemia, Acute myeloblastic leukemia with maturation, Acute myeloid dendritic cell leukemia, Acute myeloid leukemia, Acute promyelocytic leukemia, Adamantinoma, Adenocarcinoma, Adenoid cystic carcinoma, Adenoma, Adenomatoid odontogenic tumor, Adrenocortical carcinoma, Adult T-cell leukemia, Aggressive NK-cell leukemia, AIDS-Related Cancers, AIDS-related lymphoma, Alveolar soft part sarcoma, Ameloblastic fibroma, Anal cancer, Anaplastic large cell lymphoma, Anaplastic thyroid cancer, Angioimmunoblastic T-cell lymphoma, Angiomyolipoma, Angiosarcoma, Appendix cancer, Astrocytoma, Atypical teratoid rhabdoid tumor, Basal cell carcinoma, Basal-like carcinoma, B-cell leukemia, B-cell lymphoma, Bellini duct carcinoma, Biliary tract cancer, Bladder cancer, Blastoma, Bone Cancer, Bone tumor, Brain Stem Glioma, Brain Tumor, Breast Cancer, Brenner tumor, Bronchial Tumor, Bronchioloalveolar carcinoma, Brown tumor, Burkitt's lymphoma, Cancer of Unknown Primary Site, Carcinoid Tumor, Carcinoma, Carcinoma in situ, Carcinoma of the penis, Carcinoma of Unknown Primary Site, Carcinosarcoma, Castleman's Disease, Central Nervous System Embryonal Tumor, Cerebellar Astrocytoma, Cerebral Astrocytoma, Cervical Cancer, Cholangiocarcinoma, Chondroma, Chondrosarcoma, Chordoma, Choriocarcinoma, Choroid plexus papilloma, Chronic Lymphocytic Leukemia, Chronic monocytic leukemia, Chronic myelogenous leukemia, Chronic Myeloproliferative Disorder, Chronic neutrophilic leukemia, Clear-cell tumor, Colon Cancer, Colorectal cancer, Craniopharyngioma, Cutaneous T-cell lymphoma, Degos disease, Dermatofibrosarcoma protuberans, Dermoid cyst, Desmoplastic small round cell tumor, Diffuse large B cell lymphoma, Dysembryoplastic neuroepithelial tumor, Embryonal carcinoma, Endodermal sinus tumor, Endometrial cancer, Endometrial Uterine Cancer, Endometrioid tumor, Enteropathy-associated T-cell lymphoma, Ependymoblastoma, Ependymoma, Epithelioid sarcoma, Erythroleukemia,Esophageal cancer, Esthesioneuroblastoma, Ewing Family of Tumor, Ewing Family Sarcoma, Ewing's sarcoma, Extracranial Germ Cell Tumor, Extragonadal Germ Cell Tumor, Extrahepatic Bile Duct Cancer, Extramammary Paget's disease, Fallopian tube cancer, Fetus in fetu, Fibroma, Fibrosarcoma, Follicular lymphoma, Follicular thyroid cancer, Gallbladder Cancer, Gallbladder cancer, Ganglioglioma, Ganglioneuroma, Gastric Cancer, Gastric lymphoma, Gastrointestinal cancer, Gastrointestinal Carcinoid Tumor, Gastrointestinal Stromal Tumor, Gastrointestinal stromal tumor, Germ cell tumor, Germinoma, Gestational choriocarcinoma, Gestational Trophoblastic Tumor, Giant cell tumor of bone, Glioblastoma multiforme, Glioma, Gliomatosis cerebri, Glomus tumor, Glucagonoma, Gonadoblastoma, Granulosa cell tumor, Hairy Cell Leukemia, Hairy cell leukemia, Head and Neck Cancer, Head and neck cancer, Heart cancer, Hemangioblastoma, Hemangiopericytoma, Hemangiosarcoma, Hematological malignancy, Hepatocellular carcinoma, Hepatosplenic T-cell lymphoma, Hereditary breast-ovarian cancer syndrome, Hodgkin Lymphoma, Hodgkin's lymphoma, Hypopharyngeal Cancer, Hypothalamic Glioma, Inflammatory breast cancer, Intraocular Melanoma, Islet cell carcinoma, Islet Cell Tumor, Juvenile myelomonocytic leukemia, Kaposi Sarcoma, Kaposi's sarcoma, Kidney Cancer, Klatskin tumor, Krukenberg tumor, Laryngeal Cancer, Laryngeal cancer, Lentigo maligna melanoma, Leukemia, Leukemia, Lip and Oral Cavity Cancer, Liposarcoma, Lung cancer, Luteoma, Lymphangioma, Lymphangiosarcoma, Lymphoepithelioma, Lymphoid leukemia, Lymphoma, Macroglobulinemia, Malignant Fibrous Histiocytoma, Malignant fibrous histiocytoma, Malignant Fibrous Histiocytoma of Bone, Malignant Glioma, Malignant Mesothelioma, Malignant peripheral nerve sheath tumor, Malignant rhabdoid tumor, Malignant triton tumor, MALT lymphoma, Mantle cell lymphoma, Mast cell leukemia, Mediastinal germ cell tumor, Mediastinal tumor, Medullary thyroid cancer, Medulloblastoma, Medulloblastoma, Medulloepithelioma, Melanoma, Melanoma, Meningioma, Merkel Cell Carcinoma, Mesothelioma, Mesothelioma, Metastatic Squamous Neck Cancer with Occult Primary, Metastatic urothelial carcinoma, Mixed Mullerian tumor, Monocytic leukemia, Mouth Cancer, Mucinous tumor, Multiple Endocrine Neoplasia Syndrome, Multiple Myeloma, Multiple myeloma, Mycosis Fungoides, Mycosis fungoides, Myelodysplastic Disease, Myelodysplastic Syndromes, Myeloid leukemia, Myeloid sarcoma, Myeloproliferative Disease, Myxoma, Nasal Cavity Cancer, Nasopharyngeal Cancer, Nasopharyngeal carcinoma, Neoplasm, Neurinoma, Neuroblastoma, Neuroblastoma, Neurofibroma, Neuroma, Nodular melanoma, Non-Hodgkin Lymphoma, Non-Hodgkin lymphoma, Nonmelanoma Skin Cancer, Non-Small Cell Lung Cancer, Ocular oncology, Oligoastrocytoma, Oligodendroglioma, Oncocytoma, Optic nerve sheath meningioma, Oral Cancer, Oral cancer, Oropharyngeal Cancer, Osteosarcoma, Osteosarcoma, Ovarian Cancer, Ovarian cancer, Ovarian Epithelial Cancer, Ovarian Germ Cell Tumor, Ovarian Low Malignant Potential Tumor, Paget's disease of the breast, Pancoast tumor, Pancreatic Cancer, Pancreatic cancer, Papillary thyroid cancer, Papillomatosis, Paraganglioma, Paranasal Sinus Cancer, Parathyroid Cancer, Penile Cancer, Perivascular epithelioid cell tumor, Pharyngeal Cancer, Pheochromocytoma, Pineal Parenchymal Tumor of Intermediate Differentiation, Pineoblastoma, Pituicytoma, Pituitary adenoma, Pituitary tumor, Plasma Cell Neoplasm, Pleuropulmonary blastoma, Polyembryoma, Precursor T-lymphoblastic lymphoma, Primary central nervous system lymphoma, Primary effusion lymphoma, Primary Hepatocellular Cancer, Primary Liver Cancer, Primary peritoneal cancer, Primitive neuroectodermal tumor, Prostate cancer, Pseudomyxoma peritonei, Rectal Cancer, Renal cell carcinoma, Respiratory Tract Carcinoma Involving the NUT Gene on Chromosome 15, Retinoblastoma, Rhabdomyoma, Rhabdomyosarcoma, Richter's transformation, Sacrococcygeal teratoma, Salivary Gland Cancer, Sarcoma, Schwannomatosis, Sebaceous gland carcinoma, Secondary neoplasm, Seminoma, Serous tumor, Sertoli-Leydig cell tumor, Sex cord-stromal tumor, Sezary Syndrome, Signet ring cell carcinoma, Skin Cancer, Small blue round cell tumor, Small cell carcinoma, Small Cell Lung Cancer, Small cell lymphoma, Small intestine cancer, Soft tissue sarcoma, Somatostatinoma, Soot wart, Spinal Cord Tumor, Spinal tumor, Splenic marginal zone lymphoma, Squamous cell carcinoma, Stomach cancer, Superficial spreading melanoma, Supratentorial Primitive Neuroectodermal Tumor, Surface epithelial-stromal tumor, Synovial sarcoma, T-cell acute lymphoblastic leukemia, T-cell large granular lymphocyte leukemia, T-cell leukemia, T-cell lymphoma, T-cell prolymphocytic leukemia, Teratoma, Terminal lymphatic cancer, Testicular cancer, Thecoma, Throat Cancer, Thymic Carcinoma, Thymoma, Thyroid cancer, Transitional Cell Cancer of Renal Pelvis and Ureter, Transitional cell carcinoma, Urachal cancer, Urethral cancer, Urogenital neoplasm, Uterine sarcoma, Uveal melanoma, Vaginal Cancer, Verner Morrison syndrome, Verrucous carcinoma, Visual Pathway Glioma, Vulvar Cancer, Waldenstrom's macroglobulinemia, Warthin's tumor, Wilms' tumor, and combinations thereof. In some embodiments, the targeted cancer cell represents a subpopulation within a cancer cell population, such as a cancer stem cell. In some embodiments, the cancer is of a hematopoietic lineage, such as a lymphoma. In some embodiments, the cancer can be lung cancer, including non-small cell lung cancer (NSCLC), small cell lung cancer (SCLC), or any other lung cancer type. For example, the lung cancer can include adenocarcinoma, squamous carcinoma, large cell (undifferentiated) carcinoma, large cell neuroendocrine carcinoma, adenosquamous carcinoma, sarcomatoid carcinoma, lung carcinoid tumor, or adenoid cystic carcinoma. Other exemplary lung cancer can include lymphoma, sarcoma, benign lung tumor, or hamartoma.

[0119] a. Antigens

[0120] Described herein, in some embodiments, is a cytoplast comprising at least one antigen, or portion thereof, expressed by the cytoplast. In some embodiments, the at least one antigen may be an antigen expressed or released by a cancer cell. In some embodiments, the at least one antigen may be an antigen expressed or released by a pathogen. In some embodiments, the at least one antigen may be an antigen expressed or released by a virus. In some embodiments, the at least one antigen may be an antigen expressed or released by a bacterium. In some embodiments, the at least one antigen may be an antigen expressed or released by a fungus. In some embodiments, the at least one antigen can be encoded by at least one heterologous polynucleotide, where the at least one heterologous polynucleotide can be a cargo of the cytoplast. In some embodiments, the heterologous polynucleotide can comprise a viral vector or a plasmid. In some embodiments, the cytoplast delivers the heterologous polynucleotide to the target tissue. In some embodiments, the cytoplast comprising the at least one antigen or comprising the heterologous polynucleotide encoding the at least one antigen can be part of the vaccine described in the instant specification.

[0121] In some embodiments, the at least one antigen, or portion thereof, may be a cancer antigen expressed or associated with a cancer cell. In some embodiments, the cytoplast expresses at least one cancer antigen on the surface of the cytoplast. In some embodiments, the cytoplast releases or secretes at least one cancer antigen. In some embodiments, the at least one cancer antigen may be a cargo of the cytoplast. In some embodiments, the cytoplast delivers the at least one cancer antigen to target cell or tissue. The cancer antigen may be expressed by any one of the cancer cell described herein. In some embodiments, the cancer antigen expressed or released by the cytoplast described herein may be sufficient to trigger immune response (e.g. B cell activation), when the cytoplast is administered to a subject.

[0122] In some embodiments, the cytoplast comprises at least one cancer antigen, or a portion thereof. In some embodiments, the cytoplast comprise one, two, three, four, five, six, seven, eight, nine, ten, 20, 50, 100, 200, 500, 1000, 2000, 5000, 10000, or more cancer antigens. In some embodiments, the cancer antigen is at least or equal to 50%, 60%, 70%, 80%, 90%, 95%, or 99% identical to a peptidyl sequence of an antigen expressed or associated with a cancer cell.

[0123] In some embodiments, the cytoplast comprise one, two, three, four, five, six, seven, eight, nine, ten, 20, 50, 100, 200, 500, 1000, 2000, 5000, 10000, or more antigens. In some embodiments, the antigen is greater than or equal to about 50%, 60%, 70%, 80%, 90%, 95%, or 99% identical to a peptidyl sequence of an antigen described herein. In some embodiments, the antigen or portion thereof, comprises an amino acid length between about 5 amino acids to about 5,000 amino acids. In some embodiments, the antigen or portion thereof comprises an amino acid length between about 5 amino acids to about 10 amino acids, about 5 amino acids to about 15 amino acids, about 5 amino acids to about 20 amino acids, about 5 amino acids to about 25 amino acids, about 5 amino acids to about 50 amino acids, about 5 amino acids to about 100 amino acids, about 5 amino acids to about 200 amino acids, about 5 amino acids to about 500 amino acids, about 5 amino acids to about 1,000 amino acids, about 5 amino acids to about 2,000 amino acids, about 5 amino acids to about 5,000 amino acids, about 10 amino acids to about 15 amino acids, about 10 amino acids to about 20 amino acids, about 10 amino acids to about 25 amino acids, about 10 amino acids to about 50 amino acids, about 10 amino acids to about 100 amino acids, about 10 amino acids to about 200 amino acids, about 10 amino acids to about 500 amino acids, about 10 amino acids to about 1,000 amino acids, about 10 amino acids to about 2,000 amino acids, about 10 amino acids to about 5,000 amino acids, about 15 amino acids to about 20 amino acids, about 15 amino acids to about 25 amino acids, about 15 amino acids to about 50 amino acids, about 15 amino acids to about 100 amino acids, about 15 amino acids to about 200 amino acids, about 15 amino acids to about 500 amino acids, about 15 amino acids to about 1,000 amino acids, about 15 amino acids to about 2,000 amino acids, about 15 amino acids to about 5,000 amino acids, about 20 amino acids to about 25 amino acids, about 20 amino acids to about 50 amino acids, about 20 amino acids to about 100 amino acids, about 20 amino acids to about 200 amino acids, about 20 amino acids to about 500 amino acids, about 20 amino acids to about 1,000 amino acids, about 20 amino acids to about 2,000 amino acids, about 20 amino acids to about 5,000 amino acids, about 25 amino acids to about 50 amino acids, about 25 amino acids to about 100 amino acids, about 25 amino acids to about 200 amino acids, about 25 amino acids to about 500 amino acids, about 25 amino acids to about 1,000 amino acids, about 25 amino acids to about 2,000 amino acids, about 25 amino acids to about 5,000 amino acids, about 50 amino acids to about 100 amino acids, about 50 amino acids to about 200 amino acids, about 50 amino acids to about 500 amino acids, about 50 amino acids to about 1,000 amino acids, about 50 amino acids to about 2,000 amino acids, about 50 amino acids to about 5,000 amino acids, about 100 amino acids to about 200 amino acids, about 100 amino acids to about 500 amino acids, about 100 amino acids to about 1,000 amino acids, about 100 amino acids to about 2,000 amino acids, about 100 amino acids to about 5,000 amino acids, about 200 amino acids to about 500 amino acids, about 200 amino acids to about 1,000 amino acids, about 200 amino acids to about 2,000 amino acids, about 200 amino acids to about 5,000 amino acids, about 500 amino acids to about 1,000 amino acids, about 500 amino acids to about 2,000 amino acids, about 500 amino acids to about 5,000 amino acids, about 1,000 amino acids to about 2,000 amino acids, about 1,000 amino acids to about 5,000 amino acids, or about 2,000 amino acids to about 5,000 amino acids. In some embodiments, the cancer antigen comprises an amino acid length between about 5 amino acids, about 10 amino acids, about 15 amino acids, about 20 amino acids, about 25 amino acids, about 50 amino acids, about 100 amino acids, about 200 amino acids, about 500 amino acids, about 1,000 amino acids, about 2,000 amino acids, or about 5,000 amino acids. In some embodiments, the cancer antigen comprises an amino acid length between at least about 5 amino acids, about 10 amino acids, about 15 amino acids, about 20 amino acids, about 25 amino acids, about 50 amino acids, about 100 amino acids, about 200 amino acids, about 500 amino acids, about 1,000 amino acids, or about 2,000 amino acids. In some embodiments, the cancer antigen comprises an amino acid length between at most about 10 amino acids, about 15 amino acids, about 20 amino acids, about 25 amino acids, about 50 amino acids, about 100 amino acids, about 200 amino acids, about 500 amino acids, about 1,000 amino acids, about 2,000 amino acids, or about 5,000 amino acids. In some embodiments, the cancer antigen comprises an amino acid length at least about 5 amino acids to about 5,000 amino acids. In some embodiments, the cancer antigen comprises an amino acid length at least about 5 amino acids to about 10 amino acids, about 5 amino acids to about 15 amino acids, about 5 amino acids to about 20 amino acids, about 5 amino acids to about 25 amino acids, about 5 amino acids to about 50 amino acids, about 5 amino acids to about 100 amino acids, about 5 amino acids to about 200 amino acids, about 5 amino acids to about 500 amino acids, about 5 amino acids to about 1,000 amino acids, about 5 amino acids to about 2,000 amino acids, about 5 amino acids to about 5,000 amino acids, about 10 amino acids to about 15 amino acids, about 10 amino acids to about 20 amino acids, about 10 amino acids to about 25 amino acids, about 10 amino acids to about 50 amino acids, about 10 amino acids to about 100 amino acids, about 10 amino acids to about 200 amino acids, about 10 amino acids to about 500 amino acids, about 10 amino acids to about 1,000 amino acids, about 10 amino acids to about 2,000 amino acids, about 10 amino acids to about 5,000 amino acids, about 15 amino acids to about 20 amino acids, about 15 amino acids to about 25 amino acids, about 15 amino acids to about 50 amino acids, about 15 amino acids to about 100 amino acids, about 15 amino acids to about 200 amino acids, about 15 amino acids to about 500 amino acids, about 15 amino acids to about 1,000 amino acids, about 15 amino acids to about 2,000 amino acids, about 15 amino acids to about 5,000 amino acids, about 20 amino acids to about 25 amino acids, about 20 amino acids to about 50 amino acids, about 20 amino acids to about 100 amino acids, about 20 amino acids to about 200 amino acids, about 20 amino acids to about 500 amino acids, about 20 amino acids to about 1,000 amino acids, about 20 amino acids to about 2,000 amino acids, about 20 amino acids to about 5,000 amino acids, about 25 amino acids to about 50 amino acids, about 25 amino acids to about 100 amino acids, about 25 amino acids to about 200 amino acids, about 25 amino acids to about 500 amino acids, about 25 amino acids to about 1,000 amino acids, about 25 amino acids to about 2,000 amino acids, about 25 amino acids to about 5,000 amino acids, about 50 amino acids to about 100 amino acids, about 50 amino acids to about 200 amino acids, about 50 amino acids to about 500 amino acids, about 50 amino acids to about 1,000 amino acids, about 50 amino acids to about 2,000 amino acids, about 50 amino acids to about 5,000 amino acids, about 100 amino acids to about 200 amino acids, about 100 amino acids to about 500 amino acids, about 100 amino acids to about 1,000 amino acids, about 100 amino acids to about 2,000 amino acids, about 100 amino acids to about 5,000 amino acids, about 200 amino acids to about 500 amino acids, about 200 amino acids to about 1,000 amino acids, about 200 amino acids to about 2,000 amino acids, about 200 amino acids to about 5,000 amino acids, about 500 amino acids to about 1,000 amino acids, about 500 amino acids to about 2,000 amino acids, about 500 amino acids to about 5,000 amino acids, about 1,000 amino acids to about 2,000 amino acids, about 1,000 amino acids to about 5,000 amino acids, or about 2,000 amino acids to about 5,000 amino acids. In some embodiments, the antigen or portion thereof comprises an amino acid length at least about 5 amino acids, about 10 amino acids, about 15 amino acids, about 20 amino acids, about 25 amino acids, about 50 amino acids, about 100 amino acids, about 200 amino acids, about 500 amino acids, about 1,000 amino acids, about 2,000 amino acids, or about 5,000 amino acids. In some embodiments, the cancer antigen comprises an amino acid length at least at least about 5 amino acids, about 10 amino acids, about 15 amino acids, about 20 amino acids, about 25 amino acids, about 50 amino acids, about 100 amino acids, about 200 amino acids, about 500 amino acids, about 1,000 amino acids, or about 2,000 amino acids. In some embodiments, the cancer antigen comprises an amino acid length at least at most about 10 amino acids, about 15 amino acids, about 20 amino acids, about 25 amino acids, about 50 amino acids, about 100 amino acids, about 200 amino acids, about 500 amino acids, about 1,000 amino acids, about 2,000 amino acids, or about 5,000 amino acids. In some embodiments, the antigen or portion thereof comprises an amino acid length at most about 5 amino acids to about 5,000 amino acids. In some embodiments, the cancer antigen comprises an amino acid length at most about 5 amino acids to about 10 amino acids, about 5 amino acids to about 15 amino acids, about 5 amino acids to about 20 amino acids, about 5 amino acids to about 25 amino acids, about 5 amino acids to about 50 amino acids, about 5 amino acids to about 100 amino acids, about 5 amino acids to about 200 amino acids, about 5 amino acids to about 500 amino acids, about 5 amino acids to about 1,000 amino acids, about 5 amino acids to about 2,000 amino acids, about 5 amino acids to about 5,000 amino acids, about 10 amino acids to about 15 amino acids, about 10 amino acids to about 20 amino acids, about 10 amino acids to about 25 amino acids, about 10 amino acids to about 50 amino acids, about 10 amino acids to about 100 amino acids, about 10 amino acids to about 200 amino acids, about 10 amino acids to about 500 amino acids, about 10 amino acids to about 1,000 amino acids, about 10 amino acids to about 2,000 amino acids, about 10 amino acids to about 5,000 amino acids, about 15 amino acids to about 20 amino acids, about 15 amino acids to about 25 amino acids, about 15 amino acids to about 50 amino acids, about 15 amino acids to about 100 amino acids, about 15 amino acids to about 200 amino acids, about 15 amino acids to about 500 amino acids, about 15 amino acids to about 1,000 amino acids, about 15 amino acids to about 2,000 amino acids, about 15 amino acids to about 5,000 amino acids, about 20 amino acids to about 25 amino acids, about 20 amino acids to about 50 amino acids, about 20 amino acids to about 100 amino acids, about 20 amino acids to about 200 amino acids, about 20 amino acids to about 500 amino acids, about 20 amino acids to about 1,000 amino acids, about 20 amino acids to about 2,000 amino acids, about 20 amino acids to about 5,000 amino acids, about 25 amino acids to about 50 amino acids, about 25 amino acids to about 100 amino acids, about 25 amino acids to about 200 amino acids, about 25 amino acids to about 500 amino acids, about 25 amino acids to about 1,000 amino acids, about 25 amino acids to about 2,000 amino acids, about 25 amino acids to about 5,000 amino acids, about 50 amino acids to about 100 amino acids, about 50 amino acids to about 200 amino acids, about 50 amino acids to about 500 amino acids, about 50 amino acids to about 1,000 amino acids, about 50 amino acids to about 2,000 amino acids, about 50 amino acids to about 5,000 amino acids, about 100 amino acids to about 200 amino acids, about 100 amino acids to about 500 amino acids, about 100 amino acids to about 1,000 amino acids, about 100 amino acids to about 2,000 amino acids, about 100 amino acids to about 5,000 amino acids, about 200 amino acids to about 500 amino acids, about 200 amino acids to about 1,000 amino acids, about 200 amino acids to about 2,000 amino acids, about 200 amino acids to about 5,000 amino acids, about 500 amino acids to about 1,000 amino acids, about 500 amino acids to about 2,000 amino acids, about 500 amino acids to about 5,000 amino acids, about 1,000 amino acids to about 2,000 amino acids, about 1,000 amino acids to about 5,000 amino acids, or about 2,000 amino acids to about 5,000 amino acids. In some embodiments, the cancer antigen comprises an amino acid length at most about 5 amino acids, about 10 amino acids, about 15 amino acids, about 20 amino acids, about 25 amino acids, about 50 amino acids, about 100 amino acids, about 200 amino acids, about 500 amino acids, about 1,000 amino acids, about 2,000 amino acids, or about 5,000 amino acids. In some embodiments, the cancer antigen comprises an amino acid length at most at least about 5 amino acids, about 10 amino acids, about 15 amino acids, about 20 amino acids, about 25 amino acids, about 50 amino acids, about 100 amino acids, about 200 amino acids, about 500 amino acids, about 1,000 amino acids, or about 2,000 amino acids. In some embodiments, the cancer antigen comprises an amino acid length at most at most about 10 amino acids, about 15 amino acids, about 20 amino acids, about 25 amino acids, about 50 amino acids, about 100 amino acids, about 200 amino acids, about 500 amino acids, about 1,000 amino acids, about 2,000 amino acids, or about 5,000 amino acids.

[0124] In some embodiments, the cytoplast expresses the antigen on the surface of the cytoplast. In some embodiments, the cytoplast releases or secretes the antigen. In some embodiments, the antigen may be a cargo of the cytoplast. In some embodiments, the cytoplast delivers the antigen to target cell or tissue. In some embodiments, the antigen expressed or released by the cytoplast described herein may be sufficient to trigger immune response (e.g. B cell activation), when the cytoplast is administered to a subject.

[0125] In some embodiments, the antigen or portion thereof, is a cancer antigen. In some embodiments, the cancer antigen is a pathogen antigen that is introduced into a cancer cell. For example, the cytoplast can be engineered to introduce a Spike protein of the SARS-CoV-2 virus into the cancer cell. In such scenario, a subject who has been vaccinated against SARS-CoV-2 would have acquired adaptive immune system that can target and kill the cancer cell. In some embodiments, the cancer antigen can be introduced into cancer cell by utilizing oncolytic virus as a vector (loaded into the cytoplast) to introduce the mRNA into the cancer cell.

[0126] In some embodiments, the at least one antigen may be a pathogen antigen. In some embodiments, the pathogen antigen is a viral antigen, a bacterial antigen, a fungal antigen, or a toxin antigen. The antigen may be expressed by any one of the described herein (e.g., any one of the pathogens in Table 3-6). In some embodiments, the at least one antigen may be a viral antigen. The viral antigen may be an antigen of a virus described herein (e.g., SARS-CoV-2). In some embodiments, the antigen is derived from a coronavirus. In some embodiments, the cytoplast comprises at least one viral antigen that is Spike protein (S protein) or a fragment of the Spike protein of the coronavirus. In some embodiments, the Spike protein or a fragment thereof can be a monomer or a trimer. In some embodiments, the Spike protein is a prefusion stabilized Spike protein. In some embodiments, the coronavirus is SARS-CoV-2.

[0127] In some embodiments, the viral antigen of the Spike protein or a fragment thereof is at least or equal to 50%, 60%, 70%, 80%, 90%, 95%, or 99% identical to SEQ ID NOs: 2 or 8. In some embodiments, the viral antigen comprising the Spike protein or a fragment thereof comprises at least one mutation or variant as described in da Silva Filipe, A., Shepherd, J. G., Williams, T. et al. Genomic epidemiology reveals multiple introductions of SARS-CoV-2 from mainland Europe into Scotland. Nat Microbiol 6, 112-122 (2021), the entirety of which is incorporated herein. In some embodiments, the viral antigen comprising the Spike protein or a fragment thereof comprises at least one mutation comprising Asp614Gly, with reference to SEQ ID NO: 2.

[0128] In some embodiments, the viral antigen of the Spike protein or a fragment thereof comprise an amino acid length at least or equal to 5 amino acids, 10 amino acids, 20 amino acids, 25 amino acids, 50 amino acids, 100 amino acids, 200 amino acids, or more. In some embodiments, the Spike protein or a fragment thereof is expressed on the surface of the cytoplast. In some embodiments, the Spike protein or a fragment thereof is secreted by the cytoplast. In some embodiments, the Spike protein or a fragment thereof is a cargo of the cytoplast. In some embodiments, the Spike protein or a fragment thereof is delivered by the cytoplast to target tissue. In some embodiments, the cytoplast comprising the Spike protein of a fragment thereof can induce an immune response in the subject. In some embodiments, the cytoplast comprising the Spike protein of a fragment thereof can induce and confer an adaptive immunity to SARS-CoV-2 infection. In some embodiments, the cytoplast comprising the Spike protein of a fragment thereof can treat or prevent SARS-CoV-2 infection. In some embodiments, the cytoplast expresses the Spike protein on the surface of the cytoplast. In some embodiments, the cytoplast secretes the Spike protein. In some embodiments, the cytoplast delivers the Spike protein to target tissue. In some embodiments, the cytoplast expresses the Spike protein on the surface of the cytoplast, secretes the Spike protein and/or delivers the Spike protein to target tissue.

[0129] In some embodiments, the cytoplast comprises at least one viral antigen that is Nucleocapsid protein (N protein) or a fragment of the n protein. In some embodiments, the viral antigen of the Nucleocapsid protein or a fragment thereof is at least or equal to 50%, 60%, 70%, 80%, 90%, 95%, or 99% identical to SEQ ID NO: 9. In some embodiments, the viral antigen of the Nucleocapsid protein or a fragment thereof comprise an amino acid length at least or equal to 5 amino acids, 10 amino acids, 20 amino acids, 25 amino acids, 50 amino acids, 100 amino acids, 200 amino acids, or more. In some embodiments, the Nucleocapsid protein or a fragment thereof is expressed on the surface of the cytoplast. In some embodiments, the Nucleocapsid protein or a fragment thereof is secreted by the cytoplast. In some embodiments, the Nucleocapsid protein or a fragment thereof is a cargo of the cytoplast. In some embodiments, the Nucleocapsid protein or a fragment thereof is delivered by the cytoplast to target tissue. In some embodiments, the cytoplast comprising the Nucleocapsid protein of a fragment thereof can induce an immune response in the subject. In some embodiments, the cytoplast comprising the Nucleocapsid protein of a fragment thereof can induce and confer an adaptive immunity to SARS-CoV-2 infection. In some embodiments, the cytoplast comprising the Nucleocapsid protein of a fragment thereof can treat or prevent SARS-CoV-2 infection. In some embodiments, the cytoplast expresses the Nucleocapsid protein on the surface of the cytoplast. In some embodiments, the cytoplast secretes the Nucleocapsid protein. In some embodiments, the cytoplast delivers the Nucleocapsid protein to target tissue. In some embodiments, the cytoplast expresses the Nucleocapsid protein on the surface of the cytoplast, secretes the Nucleocapsid protein and/or delivers the Nucleocapsid protein to target tissue.

[0130] In some embodiments, the cytoplast comprises at least one viral antigen that is Membrane protein (M protein) or a fragment of the n protein. In some embodiments, the viral antigen of the Membrane protein or a fragment thereof is at least or equal to 50%, 60%, 70%, 80%, 90%, 95%, or 99% identical to SEQ ID NO: 10. In some embodiments, the viral antigen of the Membrane protein or a fragment thereof comprise an amino acid length at least or equal to 5 amino acids, 10 amino acids, 20 amino acids, 25 amino acids, 50 amino acids, 100 amino acids, 200 amino acids, or more. In some embodiments, the Membrane protein or a fragment thereof is expressed on the surface of the cytoplast. In some embodiments, the Membrane protein or a fragment thereof is secreted by the cytoplast. In some embodiments, the Membrane protein or a fragment thereof is a cargo of the cytoplast. In some embodiments, the Membrane protein or a fragment thereof is delivered by the cytoplast to target tissue. In some embodiments, the cytoplast comprising the Membrane protein of a fragment thereof can induce an immune response in the subject. In some embodiments, the cytoplast comprising the Membrane protein of a fragment thereof can induce and confer an adaptive immunity to SARS-CoV-2 infection. In some embodiments, the cytoplast comprising the Membrane protein of a fragment thereof can treat or prevent SARS-CoV-2 infection. In some embodiments, the cytoplast expresses the Membrane protein on the surface of the cytoplast. In some embodiments, the cytoplast secretes the Membrane protein. In some embodiments, the cytoplast delivers the Membrane protein to target tissue. In some embodiments, the cytoplast expresses the Membrane protein on the surface of the cytoplast, secretes the Membrane protein and/or delivers the Membrane protein to target tissue.

[0131] In some embodiments, the cytoplast comprises at least one viral antigen that is Envelope protein (E protein) or a fragment of the n protein. In some embodiments, the viral antigen of the Envelope protein or a fragment thereof is at least or equal to 50%, 60%, 70%, 80%, 90%, 95%, or 99% identical to SEQ ID NO: 11. In some embodiments, the viral antigen of the Envelope protein or a fragment thereof comprise an amino acid length at least or equal to 5 amino acids, 10 amino acids, 20 amino acids, 25 amino acids, 50 amino acids, 100 amino acids, 200 amino acids, or more. In some embodiments, the Envelope protein or a fragment thereof is expressed on the surface of the cytoplast. In some embodiments, the Envelope protein or a fragment thereof is secreted by the cytoplast. In some embodiments, the Envelope protein or a fragment thereof is a cargo of the cytoplast. In some embodiments, the Envelope protein or a fragment thereof is delivered by the cytoplast to target tissue. In some embodiments, the cytoplast comprising the Envelope protein of a fragment thereof can induce an immune response in the subject. In some embodiments, the cytoplast comprising the Envelope protein of a fragment thereof can induce and confer an adaptive immunity to SARS-CoV-2 infection. In some embodiments, the cytoplast comprising the Envelope protein of a fragment thereof can treat or prevent SARS-CoV-2 infection. In some embodiments, the cytoplast expresses the Envelope protein on the surface of the cytoplast. In some embodiments, the cytoplast secretes the Envelope protein. In some embodiments, the cytoplast delivers the Envelope protein to target tissue. In some embodiments, the cytoplast expresses the Envelope protein on the surface of the cytoplast, secretes the Envelope protein and/or delivers the Envelope protein to target tissue.

[0132] In some embodiments, the viral antigen is encoded by a nucleic acid sequence that is at least or equal to 50%, 60%, 70%, 80%, 90%, 95%, or 99% identical to a fragment of any one of SEQ ID NOs: 4-7. In some embodiments, the cytoplast comprises at least one viral antigen encoded by a nucleic acid sequence that is 100% identical to a fragment of any one of SEQ ID NOs: 4-7.

[0133] In some embodiments, the viral antigen is derived from a coronavirus variant. In some embodiments, In some embodiments, the coronavirus variant antigen comprises an amino acid sequence that is at least or equal to about 50%, 60%, 70%, 75%, 80%, 85%, 90%, 95%, or 99% identical to one or more of SEQ ID NOs: 401-447 or 551-562. In some embodiments, the coronavirus variant antigen is encoded from a nucleic acid sequence that is at least or equal to about 50%, 60%, 70%, 75%, 80%, 85%, 90%, 95%, or 99% identical to one or more of SEQ ID NOs: 301-347 or 501-512. In some embodiments, administration of the cytoplast expressing antigen derived from the coronavirus variant to a subject is therapeutically effective to confer immunity against an infection by the coronavirus variant, or reduce disease severity caused by the coronavirus variant, in the subject.

[0134] In some embodiments, the viral antigen is derived from an avian coronavirus. In some embodiments, In some embodiments, the avian coronavirus antigen comprises an amino acid sequence that is at least or equal to about 50%, 60%, 70%, 75%, 80%, 85%, 90%, 95%, or 99% identical to one or more of SEQ ID NOs: 251-260. In some embodiments, the avian coronavirus antigen is encoded from a nucleic acid sequence that is at least or equal to about 50%, 60%, 70%, 75%, 80%, 85%, 90%, 95%, or 99% identical to one or more of SEQ ID NOs: 201-209. In some embodiments, administration of the cytoplast expressing antigen derived from the avian coronavirus to a subject is therapeutically effective to confer immunity against an infection by the avian coronavirus, or reduce disease severity caused by the avian coronavirus, in the subject.

[0135] In some embodiments, the antigen is derived from an ebolavirus. In some embodiments, the antigen is at least or equal to about 50%, 60%, 70%, 75%, 80%, 85%, 90%, 95%, or 99% identical to ebolavirus glycoprotein, matrix protein, nucleoprotein, nucleocapsid protein (e.g., VP30, VP35, or VP24), or polymerase (L) protein. In some embodiments, the antigen comprises an amino acid sequence that is at least or equal to about 50%, 60%, 70%, 75%, 80%, 85%, 90%, 95%, or 99% identical to one or more of SEQ ID NOs: 851-859. In some embodiments, the antigen is encoded from a nucleic acid sequence that is at least or equal to about 50%, 60%, 70%, 75%, 80%, 85%, 90%, 95%, or 99% identical to one or more of SEQ ID NOs: 801-809. In some embodiments, administration of the cytoplast expressing antigen derived from the ebolavirus to a subject is therapeutically effective to confer immunity against an infection by the ebolavirus, or reduce disease severity caused by the ebolavirus, in the subject.

[0136] In some embodiments, the viral antigen is derived from a hantavirus. In some embodiments, In some embodiments, the antigen is at least or equal to about 50%, 60%, 70%, 75%, 80%, 85%, 90%, 95%, or 99% identical to hantaviral polymerase, the M segment encodes the precursor (GPC) for two viral surface glycoproteins (Gn and Gc), and the S segment encodes the nucleocapsid (N) protein. In some embodiments, the antigen comprises an amino acid sequence that is at least or equal to about 50%, 60%, 70%, 75%, 80%, 85%, 90%, 95%, or 99% identical to one or more of SEQ ID NOs: 151-154. In some embodiments, the antigen is encoded from a nucleic acid sequence that is at least or equal to about 50%, 60%, 70%, 75%, 80%, 85%, 90%, 95%, or 99% identical to one or more of SEQ ID NOs: 101-104. In some embodiments, administration of the cytoplast expressing antigen derived from the hantavirus to a subject is therapeutically effective to confer immunity against an infection by the hantavirus, or reduce disease severity caused by the hantavirus, in the subject.

[0137] In some embodiments, the viral antigen is derived from a human immunodeficiency virus (HIV). In some embodiments, In some embodiments, the HIV antigen comprises an amino acid sequence that is at least or equal to about 50%, 60%, 70%, 75%, 80%, 85%, 90%, 95%, or 99% identical to one or more of SEQ ID NOs: 651-660. In some embodiments, the HIV antigen is encoded from a nucleic acid sequence that is at least or equal to about 50%, 60%, 70%, 75%, 80%, 85%, 90%, 95%, or 99% identical to one or more of SEQ ID NOs: 601-610. In some embodiments, administration of the cytoplast expressing antigen derived from the HIV to a subject is therapeutically effective to confer immunity against an infection by the HIV, or reduce disease severity caused by the HIV, in the subject.

[0138] In some embodiments, the viral antigen is derived from a respiratory syncytial virus (RSV) such as RSV Memphis 37. In some embodiments, In some embodiments, the RSV antigen comprises an amino acid sequence that is at least or equal to about 50%, 60%, 70%, 75%, 80%, 85%, 90%, 95%, or 99% identical to one or more of SEQ ID NOs: 751-761. In some embodiments, the RSV antigen is encoded from a nucleic acid sequence that is at least or equal to about 50%, 60%, 70%, 75%, 80%, 85%, 90%, 95%, or 99% identical to one or more of SEQ ID NOs: 701-711. In some embodiments, administration of the cytoplast expressing antigen derived from the RSV to a subject is therapeutically effective to confer immunity against an infection by the RSV, or reduce disease severity caused by the RSV, in the subject.

[0139] In some embodiments, the cytoplast can comprise a plurality of viral antigens, where the viral antigens are same (e. g. the cytoplast comprising only Spike protein as the viral antigen). In some embodiments, the cytoplast can comprise a plurality of viral antigens, where the viral antigens are different. For example, a cytoplast can comprise viral antigens comprising a combination of Spike protein, Nucleocapsid protein, Membrane protein, or Envelop protein. In some embodiments, the cytoplast can comprise a combination of viral antigens that can be expressed on the surface of the cytoplast, encapsulated by the cytoplast, and/or secreted by the cytoplast.

[0140] In some embodiments, the antigen is derived from a bacterium. The bacterium may be a Gram-positive bacterium. In some embodiments, the bacterium is a Gram-negative bacterium. In some embodiments, the bacterium is a strain that is resistant to β-lactamase In some embodiments, the antigen is derived from Enterotoxigenic Escherichia coli (ETEC), Shiga toxin-producing Escherichia coli (STEC), Campylobacter jejuni, Pseudomonas aeruginosa, Acinetobacter baumannii, Streptococcus mutans, Helicobacter pylori, or Bacillus anthracis.

[0141] In some embodiments, the bacterial antigen is derived from Bacillus anthracis (e.g., Anthrax). In some embodiments, the bacterial antigen is more than or equal to about 50%, 60%, 70%, 75%, 80%, 85%, 90%, 95%, or 99% identical to protective antigen (PA), and two enzyme components, edema factor (EF) and lethal factor (LF). In some embodiments, the bacterial antigen comprises an amino acid sequence that is at least or equal to about 50%, 60%, 70%, 75%, 80%, 85%, 90%, 95%, or 99% identical to one or more of SEQ ID NOs: 1151-1153. In some embodiments, the bacterial antigen is encoded from a nucleic acid sequence that is at least or equal to about 50%, 60%, 70%, 75%, 80%, 85%, 90%, 95%, or 99% identical to one or more of SEQ ID NOs: 1101-1103. In some embodiments, administering the cytoplast expressing the bacterial antigen derived from Bacillus anthracis to a subject is therapeutically effective to immunize the subject from an infection by the Bacillus anthracis, or reduce severity of a disease or condition caused by an infection by the Bacillus anthracis.

[0142] In some embodiments, the bacterial antigen is derived from Clostridium. In some embodiments, In some embodiments, the clostridium antigen comprises an amino acid sequence that is at least or equal to about 50%, 60%, 70%, 75%, 80%, 85%, 90%, 95%, or 99% identical to one or more of SEQ ID NOs: 951-984. In some embodiments, the Clostridium antigen is encoded from a nucleic acid sequence that is at least or equal to about 50%, 60%, 70%, 75%, 80%, 85%, 90%, 95%, or 99% identical to one or more of SEQ ID NOs: 901-934. In some embodiments, administration of the cytoplast expressing antigen derived from the Clostridium to a subject is therapeutically effective to confer immunity against an infection by the Clostridium, or reduce disease severity caused by the Clostridium, in the subject.

[0143] In some embodiments, the vaccine antigen is derived from Ricin. In some embodiments, In some embodiments, the Ricin antigen comprises an amino acid sequence that is at least or equal to about 50%, 60%, 70%, 75%, 80%, 85%, 90%, 95%, or 99% identical to one or more of SEQ ID NOs: 1051-1057. In some embodiments, the Ricin antigen is encoded from a nucleic acid sequence that is at least or equal to about 50%, 60%, 70%, 75%, 80%, 85%, 90%, 95%, or 99% identical to one or more of SEQ ID NOs: 1001-1007. In some embodiments, administration of the cytoplast expressing antigen derived from the Ricin to a subject is therapeutically effective to confer immunity against or reduce toxic effect caused by the Ricin in the subject.

[0144] In some embodiments, the antigen can be a fusion protein, where any one of the protein described herein or a fragment thereof can be fused with another peptide. In some embodiments, the antigen described herein can be fused with a cell membrane protein or a transmembrane protein. Exemplary cell membrane protein or transmembrane protein can include CD63, CD81, CD82, CD47, heterotrimeric G proteins, MHC class I, integrins, transferrin receptor (TFR2), LAMP1/2, heparan sulfate proteoglycans, EMMPRIN, ADAM10, GPI-anchored 5′nucleotidase, CD73, complement-binding proteins CD55 and CD59, sonic hedgehog (SHH), TSPAN8, CD37, CD53, CD9, PECAM1, ERBB2, EPCAM, CD90, CD45, CD41, CD42a, Glycophorin A, CD14, MHC class II, CD3, Acetylcholinesterase/AChE-S, AChE-E, amyloid beta A4/APP, and multidrug resistance-associated protein.

[0145] In some embodiments, the antigen can be fused with glycosyl-phosphatidylinositol (GPI) or a B7-1 antigen (B7-1) cytoplasmic tail. In some embodiments, the antigen can be fused with albumin. In some embodiments, the antigen can be expressed along with a polypeptide comprising a molecular clamp. In some embodiments, the molecular clamp, when expressed along with antigen in the same cytoplast, keeps the antigen in a pre-fusion form. In some embodiments, the molecular clamp comprises the polypeptide encoding a pattern that repeats after every two, three, four, five, six, seven, eight, nine, 10, 11, 12, 13, 14, 15, or more amino acid residues. In some embodiments, the polypeptide encoding the molecular clam is at least seven, eight, nine, 10, 11, 12, 13, 14, 15, 16, 17, 18, 19, 20 or more amino acid residues in length. In some embodiments, the molecular clamp self-assembles into a twin helix with one strand going forward and the other in reverse. In some embodiments, the pairing of the amino acids in the strands is ensured by a pattern of hydrophobic and hydrophilic amino acids. In some embodiments, the pattern is arranged so that none of the clamp binds to the viral antigen. In some embodiments, the molecular clamp self-assembles into a stiff rod. In some embodiments, the molecular clamp is linked to the desired part of the viral antigen by a linker, which can serve other functions such as allowing the cytoplast expressing the molecular clamp to be purified from a mixture.

[0146] In some embodiments, the antigen is a tumor antigen, or portion thereof, such as alphafetoprotein (AFP), carcinoembryonic antigen (CEA), CA0125, MUC-1, epithelium tumor antigen (ETA). In some embodiments, the antigen comprises an amino acid sequence that is at least or equal to about 50%, 60%, 70%, 75%, 80%, 85%, 90%, 95%, or 99% identical to any cancer epitope that is commonly known. In some embodiments, administration of the cytoplast expressing the tumor antigen, or portion thereof, to a subject is therapeutically effective to immunize the subject against an infection by an oncovirus, or reduce the severity of the cancer caused by the oncovirus.

[0147] b. Heterologous Nucleic Acid

[0148] Described herein, in some embodiments, is a vaccine comprising at least one heterologous polynucleotide. Non-limiting examples of polynucleotides that may be heterologous include coding or non-coding regions of a gene or gene fragment, loci (locus) defined from linkage analysis, exons, introns, messenger RNA (mRNA), self-amplifying RNA, uridine containing RNA (uRNA), self-amplifying mRNA, transfer RNA (tRNA), ribosomal RNA (rRNA), short interfering RNA (siRNA), short-hairpin RNA (shRNA), micro-RNA (miRNA), ribozymes, cDNA, recombinant polynucleotides, branched polynucleotides, plasmids, vectors, isolated DNA of any sequence, isolated RNA of any sequence, cell-free polynucleotides including cell-free DNA (cfDNA) and cell-free RNA (cfRNA), nucleic acid probes, and primers. The sequence of nucleotides can be interrupted by non-nucleotide components. In some embodiments, the antigen translated from the heterologous polynucleotide can induce immune response in the subject. In some embodiments, the antigen translated from the heterologous polynucleotide can confer adaptive immunity to infection caused by any one of the pathogen described herein in the subject. In some embodiments, the antigen translated from the heterologous polynucleotide can treat or prevent a pathogenic infection caused by any one of the pathogens described herein in the subject.

[0149] In some embodiments, the heterologous polynucleotide can encode one or more of the immune-modulators described herein. In some embodiments, the immune-modulators augment the immune response induced by any one of the antigens described herein. In some embodiments, the immune-modulator is Ii-key/MHC class II epitope peptide. In some embodiments, the immune-modulator is any one of the cytokines described herein. In some embodiments, the heterologous polynucleotide can encode one or more of the homing proteins or one or more of the homing receptors described herein. In some embodiments, the homing protein can be secreted by the cytoplast. In some embodiments, the homing receptor can be expressed on the surface of the cytoplast. In some embodiments, the one or more homing receptors can be specific to one or more ligands expressed on one or more cells in lymph tissue, cells in the lymph tissue can comprise endothelial cells, lymphocytes, macrophages, or reticular cells, or a combination thereof

[0150] In some embodiments, the heterologous polynucleotide can encode one or more of the targeting moieties described herein. In some embodiments, the heterologous polynucleotide can encode one or more of the immune-modulators described herein. In some embodiments, the heterologous polynucleotide can encode one or more of homing receptors described herein. In some embodiments, the heterologous polynucleotide can encode one or more of the homing proteins described herein. In some embodiments, the heterologous polynucleotide can encode one or more of the anti-viral compositions described herein.

[0151] In some embodiments, the heterologous polynucleotide comprises a heterologous DNA sequence encoding the viral antigen. In some embodiments, the heterologous DNA sequence encodes any one of orf1a, orf1ab, Spike protein (S protein), 3a, 3b, Envelope protein (E protein), Membrane protein (M protein), p6, 7a, 7b, 8b, 9b, Nucleocapsid protein (N protein), orf14, nsp1 (leader protein), nsp2, nsp3, nsp4, nsp5 (3C-like proteinase), nsp6, nsp7, nsp8, nsp9, nsp10 (growth-factor-like protein), nsp12 (RNA-dependent RNA polymerase, or RdRp), nsp13 (RNA 5′-triphosphatase), nsp14 (3′-to-5′ exonuclease), nsp15 (endoRNAse), and nsp16 (2′-O-ribose methyltransferase). In some embodiments, the cytoplast comprises the heterologous DNA sequence encoding Spike protein or a fragment thereof. In some embodiments, the cytoplast comprises the heterologous DNA sequence encoding Nucleocapsid protein or a fragment thereof. In some embodiments, the cytoplast comprises the heterologous DNA sequence encoding Membrane protein or a fragment thereof. In some embodiments, the cytoplast comprises the heterologous DNA sequence encoding Envelope protein or a fragment thereof. In some embodiments, the heterologous polynucleotide can comprise one or more heterologous DNA sequences encoding one or more antigens. For example, the heterologous polynucleotide can encode an S protein antigen and a N protein antigen. In some embodiments, the heterologous DNA sequences can encode any one of the different viral antigens described herein. In some embodiments, the cytoplast transcribes and translates the heterologous DNA sequence into the viral antigen. In some embodiments, the cytoplast delivers the heterologous DNA sequence to target tissue, where the heterologous DNA sequence is transcribed and then translated into the viral antigen by the target tissue. In some embodiments, the heterologous polynucleotide comprises a plasmid comprising the heterologous DNA sequence encoding any one of the antigens described herein. In some embodiments, the cytoplast comprises a SARS-CoV-2 vaccine comprising a DNA vaccine (GX-19) comprising a nucleic acid encoding an antigen derived from Spike protein of SARS-CoV-2.

[0152] In some embodiments, the at least one heterologous polynucleotide is at least or equal to about 50%, 60%, 70%, 80%, 90%, 95%, or 99% identical to a fragment of any one of SEQ ID NOs: 4-7. In some embodiments, the at least one heterologous polynucleotide is about 100% identical to a fragment of any one of SEQ ID NOs: 4-7. In some embodiments, the at least one heterologous polynucleotide encodes a viral antigen that is at least or equal to about 50%, 60%, 70%, 80%, 90%, 95%, or 99% identical to a fragment of SEQ ID NO: 8. In some embodiments, the at least one heterologous polynucleotide encodes a viral antigen that is 100% identical to a fragment of SEQ ID NO: 8. In some embodiments, the at least one heterologous polynucleotide encodes a viral antigen that is at least or equal to about 50%, 60%, 70%, 80%, 90%, 95%, or 99% identical to a fragment of SEQ ID NO: 9. In some embodiments, the at least one heterologous polynucleotide encodes a viral antigen that is about 100% identical to a fragment of SEQ ID NO: 9. In some embodiments, the at least one heterologous polynucleotide encodes a viral antigen that is at least or equal to about 50%, 60%, 70%, 80%, 90%, 95%, or 99% identical to a fragment of SEQ ID NO: 10. In some embodiments, the at least one heterologous polynucleotide encodes a viral antigen that is about 100% identical to a fragment of SEQ ID NO: 10. In some embodiments, the at least one heterologous polynucleotide encodes a viral antigen that is at least or equal to about 50%, 60%, 70%, 80%, 90%, 95%, or 99% identical to a fragment of SEQ ID NO: 11. In some embodiments, the at least one heterologous polynucleotide encodes a viral antigen that is about 100% identical to a fragment of SEQ ID NO: 11.

[0153] In some embodiments, the heterologous polynucleotide comprises a heterologous RNA sequence encoding the viral antigen. In some embodiments, the heterologous RNA sequence comprises an mRNA sequence encoding the viral antigen In some embodiments, the mRNA encodes any one of orf1a, orf1ab, Spike protein (S protein), 3a, 3b, Envelope protein (E protein), Membrane protein (M protein), p6, 7a, 7b, 8b, 9b, Nucleocapsid protein (N protein), orf14, nsp1 (leader protein), nsp2, nsp3, nsp4, nsp5 (3C-like proteinase), nsp6, nsp7, nsp8, nsp9, nsp10 (growth-factor-like protein), nsp12 (RNA-dependent RNA polymerase, or RdRp), nsp13 (RNA 5′-triphosphatase), nsp14 (3′-to-5′ exonuclease), nsp15 (endoRNAse), and nsp16 (2′-O-ribose methyltransferase). In some embodiments, the cytoplast comprises mRNA encoding Spike protein or a fragment thereof. In some embodiments, the cytoplast comprises mRNA encoding Nucleocapsid protein or a fragment thereof. In some embodiments, the cytoplast comprises mRNA encoding Membrane protein or a fragment thereof. In some embodiments, the cytoplast comprises mRNA encoding Envelope protein or a fragment thereof. In some embodiments, the heterologous polynucleotide can comprise one or more mRNA sequences. In some embodiments, the mRNA sequences can encode any one of the different viral antigens described herein. In some embodiments, the cytoplast translates the mRNA into the viral antigen. In some embodiments, the cytoplast delivers the mRNA to target tissue, where the mRNA is translated into the viral antigen by the target tissue. In some embodiments, the mRNA is a self-amplifying mRNA (saRNA). In some embodiments, the mRNA comprises uridine (uRNA). In some embodiments, the cytoplast comprises a SARS-CoV-2 vaccine comprising an mRNA encoding the full-length, prefusion stabilized Spike (S) protein (mRNA-1273). In some embodiments, the heterologous polynucleotide comprises one or more heterologous RNA sequences encoding one or more of the antigens described herein. In some embodiments, the cytoplast comprises a SARS-CoV-2 vaccine (mRNA-LNP vaccine) comprising an mRNA encoding an antigen derived from a protein of SARS-CoV-2. The mRNA is encapsulated and delivered via the use of lipid nanoparticle.

[0154] In some embodiments, the cytoplast comprises DNA or RNA vectors comprising the at least one heterologous polynucleotide encoding the viral antigens. In some embodiments, the DNA or RNA vectors can be plasmids. In some embodiments, the DNA or RNA vectors can be viral vector. Viral vectors, and especially retroviral vectors, can be engineered to comprise nucleic acid sequence encoding any one of the viral antigen described herein and be delivered to the target tissue by the cytoplast. In some embodiments, the viral vectors can be derived from lentivirus, poxviruses, herpes simplex virus I, adenoviruses and adeno-associated viruses, and the like. Exemplary viral vectors include retroviral vectors, adenoviral vectors, adeno-associated viral vectors (AAVs), replication-deficient chimpanzee adenovirus, ChAdOx1, Newcastle disease virus vector, M2-deficient single replication (M2SR) influenza vector, pox vectors, parvoviral vectors, baculovirus vectors, measles viral vectors, vesicular stomatitis virus (VSV) vector, or herpes simplex virus vectors (HSVs). In some embodiments, the retroviral vectors include gamma-retroviral vectors such as vectors derived from the Moloney Murine Leukemia Virus (MoMLV, MMLV, MuLV, or MLV) or the Murine Steam cell Virus (MSCV) genome. In some embodiments, the retroviral vectors also include lentiviral vectors such as those derived from the human immunodeficiency virus (HIV) genome. In some embodiments, AAV vectors include AAV1, AAV2, AAV4, AAV5, AAV6, AAV7, AAV8, or AAV9 serotype. In some embodiments, the viral vector is a chimeric viral vector, comprising viral portions from two or more viruses. In additional instances, the viral vector is a recombinant viral vector. In some embodiments, the cytoplast comprises a SARS-CoV-2 vaccine (Gam-COVID-Vac or Gam-COVID-Vac lyo) non-replicating viral vector comprising nucleic acid encoding S protein or a fragment thereof of the SARS-CoV-2. In some embodiments, the cytoplast comprises a SARS-CoV-2 vaccine comprising an adenoviral vector comprising nucleic acid sequence the Spike (S) protein of SARS-CoV-2 (Ad5-nCoV). In some embodiments, the cytoplast comprises a SARS-CoV-2 vaccine comprising a replication-deficient chimpanzee adenovirus, ChAdOxl, which is engineered to express the Spike (S) protein of SARS-CoV-2. In some embodiments, the cytoplast comprises a SARS-CoV-2 vaccine comprising a non-replicative adenoviral vector (AdVac) comprising nucleic acid encoding an antigen derived from a protein of SARS-CoV-2. In some embodiments, the AdVac vaccine is prepared with PER.C6 cells. In some embodiments, the cytoplast comprises a SARS-CoV-2 vaccine comprising INO-4800 pGX DNA plasmid with nucleic acid encoding the Spike (S) protein of SARS-CoV-2 as the insert. In some embodiments, the cytoplast comprises a SARS-CoV-2 vaccine comprising mRNA or modified mRNA to express the Spike (S) protein or a fragment thereof of SARS-CoV-2 (BNT162). In some embodiments, the cytoplast comprises a SARS-CoV-2 vaccine comprising a measles vector comprising nucleic acid encoding the Spike protein or a fragment thereof of SARS-CoV-2. In some embodiments, the cytoplast comprises a SARS-CoV-2 vaccine comprising DNA encoding the Spike protein delivered to the muscle of the subject via injection followed by electroporation.

[0155] c. Inactivated Pathogen and Portions Thereof

[0156] In some embodiments, the cytoplast comprises an inactivated pathogen (e.g., virus, bacterium, parasite, or fungus), or portion thereof. In some embodiments, the inactivated pathogen is an inactivated virus or a portion thereof. In some embodiments, the inactivated virus is any one of the viruses described herein. In some embodiments, the inactivated virus is derived from a coronavirus, a hantavirus, an ebolavirus, an influenza virus, a respiratory syncytial virus, a rotavirus, a norovirus, a hepatitis virus, or porcine reproductive and respiratory syndrome virus. In some embodiments, the inactivated virus is derived from a coronavirus. In some embodiments, the inactivated virus is a betacoronavirus such as a SARS-CoV-2. In some embodiments, the inactivated virus is inactivated SARS-CoV-2.

[0157] In some embodiments, the cytoplast comprises inactivated SARS-CoV-2. In some embodiments, the SARS-CoV-2 comprises a mutation comprising Asp614Gly, Pro323Leu, Ile599Val, pro585Ser, Phe308Tyr, Thr141Ile, Asp248Glu, Thr85Ile, Ala18Val, Asn439Lys, Glu251Val, Pro10ser, Ser194Leu, Ser197Leu, Gly196Val, Leu108Phe, Gln213Lys, Leu84Ser, Thr175Met, Ser563Leu, Val13Leu, Gln57His, or Thr14Ile, as compared with the full-length amino acid sequence for the Wuhan strain.

[0158] In some embodiments, the cytoplast comprising inactivated SARS-CoV-2 induces immune response and adaptive immunity towards SARS-CoV-2 in a subject when the cytoplast comprising the inactivated SARS-CoV-2 is engulfed by immune cell of the subject. Upon engulfing the cytoplast, the immune cell contacts the inactivated SARS-CoV-2 and subsequently develops adaptive immune response towards SARS-CoV-2. In some embodiments, the inactivated SARS-CoV-2 virus is formalin-inactivated SARS-CoV-2 virus. In some embodiments, the cytoplast comprises a SARS-CoV-2 vaccine (PiCoVacc) comprising a formalin-inactivated SARS-CoV-2 virus, obtained from vero cell culture. In some embodiments, the cytoplast comprises a SARS-CoV-2 vaccine comprising Bacille Calmette-Guérin (BCG). In some embodiments, the cytoplast comprises a SARS-CoV-2 vaccine (bacTRL-Spike) comprising bifidobacterial engineered to express the Spike protein of SARSO-CoV-2. In some embodiments, the cytoplast comprises a SARS-CoV-2 vaccine (PittCoVacc) comprising delivering the Spike (S) protein or a fragment thereof of SARS-CoV-2 via the use of microneedle array. In some embodiments, the cytoplast comprises a SARS-CoV-2 vaccine (NVX-CoV2373) comprising a multiple recombinant nanoparticle vaccine comprising a prefusion form of the Spike protein of SARS-CoV-2. In some embodiments, the cytoplast comprising the NVX-CoV2373 comprises an adjuvant or an immune-modulator. In some embodiments, the cytoplast comprises a SARS-CoV-2 vaccine comprising virus-like particle (VLP) mimicking the viral structure of SARS-CoV-2, where the VLP is manufactured from plant-based production methods. In some embodiments, the cytoplast comprises a SARS-CoV-2 vaccine (LUNAR-COV19) comprising an mRNA encoding the Spike protein of SARS-CoV-2. The mRNA is encapsulated and delivered via the use of lipid-mediated delivery system. In some embodiments, the cytoplast comprises a SARS-CoV-2 vaccine comprising an antigen derived from a Spike protein, said vaccine further comprising gp96 and OX40L, co-stimulators of T cell. In some embodiments, the cytoplast comprises a SARS-CoV-2 vaccine (T-COVIDTM)) comprising replication-deficient adenovirus 5 (RD-Ad5) vector comprising nucleic acid encoding Spike protein or a fragment thereof of SARS-CoV-2, where the T-COVIDTM vaccine is formulated for intranasal delivery. In some embodiments the cytoplast comprising a SARS-CoV-2 vaccine is formulated for administration via any suitable route, e.g., subcutaneous, intravenous, arterial, ocular, oral, intramuscular, intranasal (e.g., inhalation), intraperitoneal, topical, mucosal, epidural, sublingual, epicutaneous, extra-amniotic, inter-articular, intradermal, intraosseous, intrathecal, intrauterine, intravaginal, intravesical, intravitreal, perivascular, and/or rectal administration, or any combination of known administration methods.

[0159] In some embodiment the inactivated virus is derived from a virus that causes viral hemorrhagic fevers, including Filoviruses (Ebola, Marburg) and Arenaviruses (Lassa, Machupo). In some embodiments, the inactivated virus is derived from a virus that causes viral encephalitis (alphaviruses, such as eastern equine encephalitis, Venezuelan equine encephalitis, and western equine encephalitis). In some embodiments, the inactivated virus is derived from a hantavirus, an ebolavirus, an influenza virus, a respiratory syncytial virus, a rotavirus, a norovirus, a hepatitis virus, or porcine reproductive and respiratory syndrome virus.

[0160] In some embodiments, the inactivated pathogen is an inactivated bacterium, or portion thereof. In some embodiments, the antigen is derived from an inactivated bacterium. The inactivated bacterium may be derived from a Gram-positive bacterium. In some embodiments, the inactivated bacterium is derived from a Gram-negative bacterium. In some embodiments, inactivated bacterium is derived from a strain that is resistant to B-lactamase In some embodiments, the inactivated bacterium is derived from Enterotoxigenic Escherichia coli (ETEC), Shiga toxin-producing Escherichia coli (STEC), Campylobacter jejuni, Pseudomonas aeruginosa, Acinetobacter baumannii, Streptococcus mutans, Helicobacter pylori, or Bacillus anthracis. In some embodiments, the inactivated bacterium is derived from a bacterium of Brucellosis (Brucella species), Epsilon toxin of Clostridium perfringens. Food safety threats (Salmonella species, Escherichia coli O 157:H7, Shigella), Glanders (Burkholderia mallei), Melioidosis (Burkholderia pseudomallei), Psittacosis (Chlamydia psittaci), Q fever (Coxiella burnetii), Ricin toxin from Ricinus communis (castor beans), Staphylococcal enterotoxin B, Typhus fever (Rickettsia prowazekii), Water safety threats (Vibrio cholerae, Cryptosporidium parvum), Anthrax (Bacillus anthracis), Botulism (Clostridium botulinum toxin), Plague (Yersinia pestis), Smallpox (variola major), or Tularemia (Francisella tularensis) 2. Additional Exogenous Agents

[0161] Cytoplasts of the present disclosure may be engineered to express an additional exogenous agent such as an immune modulator. In some embodiments, the cytoplast comprises one or more immune-modulators described herein. An immune-modulator may be a molecule that directly or indirectly stimulates an immune response in a subject. In some embodiments, the immune-modulator may be an immune activator to elicit an adaptive immune response in the subject. In some embodiments, the immune activator may be an immune suppressor to suppress an overactive immune system in a subject, for example, a subject with a proliferative disease or disorder. In some embodiments, the immune-modulator may be expressed on the surface of the cytoplast. In some embodiments, the immune-modulator may be released by the cytoplast. In some embodiments, the immune-modulator may be secreted by the cytoplast. In some embodiments, the immune-modulator may be a cargo of the cytoplast. In some embodiments, the immune-modulator maybe a peptide or protein that is fused with the antigen described herein. In some embodiments, the immune-modulator may be an adjuvant.

[0162] In a non-limiting example, the immune-modulator may directly stimulates an immune response by binding to a cognate receptor on the surface of immune cells, which causes the immune cells to release cytokines, thereby activating the immune cells. Activation of immune cells, in some embodiments, facilitates the development of adaptive immunity against the virus. As another example, an immune-modulator indirectly stimulates an immune response by suppressing IL-10 production and secretion by the target cell and/or by suppressing the activity of regulatory T cells, resulting in, for example, an increased anti-tumor response by immune cells. By contrast, an immune-modulator acting as an immune suppressor can directly or indirectly inhibit an immune response in the subject.

[0163] In certain embodiments, an immune-modulator targets a pattern recognition receptor (PRR). These receptors can be transmembrane or intra-endosomal proteins which can prime activation of the immune system in response to infectious agents such as pathogens. PRRs can recognize pathogen-associated molecular patterns (PAMPs) molecules and damage-associated molecular patterns (DAMPs) molecules. A PRR can be membrane bound. A PRR can be cytosolic. Membrane-bound PRRs include toll-like receptors and C-type lectin receptors, such as mannose receptors and asialoglycoprotein receptors. Cytoplastic PRRs include NOD-like receptors, and RIG-I-like receptors.

[0164] In certain embodiments, an immune-modulator is a Damage-Associated Molecular Pattern (DAMP) molecule or a Pathogen-Associated Molecular Pattern (PAMP) molecule, such as a DAMP agonist or a PAMP agonist. DAMP molecules and PAMP molecules can be recognized by receptors of the innate immune system, such as Toll-like receptors (TLRs), Nod-like receptors, C-type lectins, and RIG-I-like receptors. In certain embodiments, an immune-modulatory agent is a Toll-like receptor agonist, a STING agonist, or a RIG-I agonist. Examples of DAMP molecules can include proteins such as chromatin-associated protein high-mobility group box 1 (HMGB1), S100 molecules of the calcium modulated family of proteins and glycans, such as hyaluronan fragments, and glycan conjugates. DAMP molecules can also be nucleic acids, such as DNA, when released from tumor cells following apoptosis or necrosis. Examples of additional DAMP nucleic acids can include RNA and purine metabolites, such as ATP, adenosine and uric acid, present outside of the nucleus or mitochondria.

[0165] In some embodiments, an immune-modulator is a cytosolic DNA and bacterial nucleic acids called cyclic dinucleotides, that are recognized by Interferon Regulatory Factor (IRF) or stimulator of interferon genes (STING), which can act a cytosolic DNA sensor. Compounds recognized by Interferon Regulatory Factor (IRF) can play a role in immunoregulation by TLRs and other pattern recognition receptors.

[0166] An immune-modulator can be a toll-like receptor (TLR) agonist. An immune-modulatory agent can be RIG-I-like receptor ligand. An immune-modulatory agent can be a C-type lectin receptor ligand. An immune-modulatory agent can be a NOD-like receptor ligand.

[0167] In some embodiments, an immune-modulator is a TLR agonist. In some embodiments, an immune-modulator is selected the group consisting of a TLR1, TLR2, TLR3, TLR4, TLR5, TLR6, TLR7, TLR8, TLR9, TLR10, TLR11, TLR12 or TLR13 agonist, according the animal species.

[0168] In some embodiments, an immune-modulator activator is a ligand of TLR2 comprising: (a) a heat killed bacteria product, preferably HKAL, HKEB, HKHP, HKLM, HKLP, HKLR, HKMF, HKPA, HKPG, or HKSA, HKSP, and (b) a cell-wall components product, preferably LAM, LM, LPS, LIA, LIA, PGN, FSL, Pam2CSK4, Pam3CSK4, or Zymosan.

[0169] In some embodiments, an immune-modulator is a ligand of TLR3 selected from the group consisting of: rintatolimod, poly-ICLC, RIBOXXON®, Apoxxim, RIBOXXIM®, IPH-33, MCT-465, MCT-475, and ND-1.1.

[0170] In some embodiments, an immune-modulator is a ligand of TLR4 selected from the group consisting of LPS, MPLA or a pyrimido[5,4-b]indole such as those described in WO 2014/052828 (U of Cal), AZ126 (N-(2-(cyclopentylamino)-2-oxo-1-(pyridin-4-yl)ethyl)-N-(4-methoxyphenyl)-3-methyl-5-phenyl-1H-pyrrole-2-carboxamide) or AZ368 ((E)-3-(4-(2-(cyclopentylamino)-1-(N-(4-isopropylphenyl)-1,5-diphenyl-1H-pyrazole-3-carboxamido)-2-oxoethyl)phenyl)acrylic acid).

[0171] In some embodiments, an immune-modulator is a ligand of TLR5 selected from the group consisting of: FLA and Flagellin. In some embodiments, an immune-modulator is a ligand of TLR6. In certain embodiments, an immune-modulator is a TLR7 agonist and/or a TLR8 agonist. In certain embodiments, an immune-modulator is a TLR7 agonist. In certain embodiments, an immune-modulator is a TLR8 agonist. In some embodiments, an immune-modulator selectively agonizes TLR7 and not TLR8. In other embodiments, an immune-stimulator agonizes TLR8 and not TLR7.

[0172] In certain embodiments, an immune-modulator is a TLR7 agonist. In certain embodiments, the TLR7 agonist is selected from an imidazoquinoline, an imidazoquinoline amine, a thiazoquinoline, an aminoquinoline, an aminoquinazoline, a pyrido [3,2-d]pyrimidine-2,4-diamine, pyrimidine-2,4-diamine, 2-aminoimidazole, 1-alkyl-1H-benzimidazol-2-amine, tetrahydropyridopyrimidine, heteroarothiadiazide-2,2-dioxide, a benzonaphthyridine, a guanosine analog, an adenosine analog, a thymidine homopolymer, ssRNA, CpG-A, PolyG10, and PolyG3. In certain embodiments, the TLR7 agonist is selected from an imidazoquinoline, an imidazoquinoline amine, a thiazoquinoline, an aminoquinoline, an aminoquinazoline, a pyrido [3,2-d]pyrimidine-2,4-diamine, pyrimidine-2,4-diamine, 2-aminoimidazole, 1-alkyl-1H-benzimidazol-2-amine, tetrahydropyridopyrimidine, heteroarothiadiazide-2,2-dioxide or a benzonaphthyridine, but is other than a guanosine analog, an adenosine analog, a thymidine homopolymer, ssRNA, CpG-A, PolyG10, and PolyG3. In some embodiments, a TLR7 agonist is a non-naturally occurring compound. Examples of TLR7 modulators include GS-9620, GSK-2245035, imiquimod, resiquimod, DSR-6434, DSP-3025, IMO-4200, MCT-465, MEDI-9197, 3M-051, SB-9922, 3M-052, Limtop, TMX-30X, TMX-202, RG-7863, RG-7795, and the compounds disclosed in US20160168164 (Janssen), US 20150299194 (Roche), US20110098248 (Gilead Sciences), US20100143301 (Gilead Sciences), and US20090047249 (Gilead Sciences). In some embodiments, a TLR7 agonist has an EC50 value of 500 nM or less by PBMC assay measuring TNFalpha or IFNalpha production. In some embodiments, a TLR7 agonist has an EC50 value of 100 nM or less by PBMC assay measuring TNFalpha or IFNalpha production. In some embodiments, a TLR7 agonist has an EC50 value of 50 nM or less by PBMC assay measuring TNFalpha or IFNalpha production. In some embodiments, a TLR7 agonist has an EC50 value of 10 nM or less by PBMC assay measuring TNFalpha or IFNalpha production.

[0173] In certain embodiments, an immune-modulator is a TLR8 agonist. In certain embodiments, the TLR8 agonist is selected from the group consisting of a benzazepine, an imidazoquinoline, a thiazoloquinoline, an aminoquinoline, an aminoquinazoline, a pyrido [3,2-d]pyrimidine-2,4-diamine, pyrimidine-2,4-diamine, 2-aminoimidazole, 1-alkyl-1H-benzimidazol-2-amine, tetrahydropyridopyrimidine or a ssRNA. In certain embodiments, a TLR8 agonist is selected from the group consisting of a benzazepine, an imidazoquinoline, a thiazoloquinoline, an aminoquinoline, an aminoquinazoline, a pyrido [3,2-d]pyrimidine-2,4-diamine, pyrimidine-2,4-diamine, 2-aminoimidazole, 1-alkyl-1H-benzimidazol-2-amine, tetrahydropyridopyrimidine and is other a ssRNA. In some embodiments, an immune-modulator is a TLR8 agonist, other than a naturally occurring TLR8 agonist or a benzazepine agonist of TLR8.

[0174] In one embodiment, the cytoplast described herein can express and/or secret at least one immune-modulator comprising a co-stimulatory ligand which is a non-antigen specific signal important for full activation of an immune cell. Co-stimulatory ligands include, without limitation, tumor necrosis factor (TNF) ligands, cytokines (such as IL-2, IL-12, 1L-15 or IL21), and immunoglobulin (Ig) superfamily ligands. Tumor necrosis factor (TNF) is a cytokine involved in systemic inflammation and stimulates the acute phase reaction. Its primary role is in the regulation of immune cells. Tumor necrosis factor (TNF) ligands share a number of common features. The majority of the ligands are synthesized as type II transmembrane proteins containing a short cytoplasmic segment and a relatively long extracellular region. TNF ligands include, without limitation, nerve growth factor (NGF), CD4OL (CD4OL)/CD154, CD137L/4-1BBL, tumor necrosis factor alpha (TNFa), CD134L/OX4OL/CD252, CD27L/CD70, Fas ligand (FasL), CD3OL/CD153, tumor necrosis factor f3 (TNF(3)/lymphotoxin-alpha (LTa), lymphotoxin-beta (ur(3), CD257/B cell-activating factor (BAFF)/Blys/THANK/Ta11-1, glucocorticoid-induced TNF Receptor ligand (GITRL), and TNF-related apoptosis-inducing ligand (TRAIL), LIGHT (TNFSF14). The immunoglobulin (Ig) superfamily is a large group of cell surface and soluble proteins that are involved in the recognition, binding, or adhesion processes of cells. These proteins share structural features with immunoglobulins, they possess an immunoglobulin domain (fold). Immunoglobulin superfamily ligands include, without limitation, CD80 and CD86, both ligands for CD28.

[0175] In some embodiments, the immune-modulator can be an adjuvant. In some embodiments, the adjuvant can comprise analgesic adjuvants. In some embodiments, the adjuvant can comprise inorganic compounds such as alum, aluminum hydroxide, aluminum phosphate, or calcium phosphate hydroxide. In some embodiments, the adjuvant can comprise mineral oil or paraffin oil. In some embodiments, the adjuvant can comprise bacterial products such as inactivated Bordetella pertussis, Mycobacterium bovis, tor oxoids. In some embodiments, the adjuvant can comprise nonbacterial organics like squalene. In some embodiments, the adjuvant can comprise the use of delivery systems such as detergents (Quil A). In some embodiments, the adjuvant can comprise plant saponins such as saponin derived from Quillaja, soybean, or Polygala senega. In some embodiments, the adjuvant can comprise Freund's complete adjuvant or Freund's incomplete adjuvant. In some embodiments, the adjuvant can comprise food-based oil like peanut oil.

[0176] In some embodiments, the cytoplast comprises one or more additional therapeutic agents such as an anti-viral composition described herein. In some embodiments, the one or more additional therapeutic agents may be any one of or any combination of a therapeutic DNA molecule, a therapeutic RNA molecule, a therapeutic protein (e.g., an enzyme, an antibody, an antigen, a toxin, cytokine, a protein hormone, a growth factor, a cell surface receptor, or a vaccine), a therapeutic peptide (e.g., a peptide hormone or an antigen), a small molecule active agent (e.g., a steroid, a polyketide, an alkaloid, a toxin, an antibiotic, an antiviral, a colchicine, a taxol, a mitomycin, or emtansine), and a therapeutic gene editing factor.

[0177] D. Pharmaceutic Compositions, Formulations, Dosages, and Routes of Administration

[0178] Provided herein are pharmaceutical compositions that include a cytoplast (e.g., a cytoplast obtained from any cell described herein). In some embodiments, the compositions are formulated for different routes of administration (e.g., intravenous, subcutaneous, intramuscular, retro-orbital, intraperitoneal, intra-lymph node). In some embodiments, the compositions can include a pharmaceutically acceptable carrier (e.g., phosphate buffered saline). The term “pharmaceutical composition” refers to a mixture of a cytoplast disclosed herein with other chemical components, such as diluents or carriers. The pharmaceutical composition can facilitate administration of the compound to an organism.

[0179] In general, methods disclosed herein comprise administering a cytoplast composition by systemic administration. In some embodiments, methods comprise administering a cytoplast composition by oral administration. In some embodiments, methods comprise administering a cytoplast composition by intraperitoneal injection. In some embodiments, methods comprise administering a cytoplast composition in the form of an anal suppository. In some embodiments, methods comprise administering a cytoplast composition by intravenous (“i.v.”) administration. It is conceivable that one may also administer cytoplast compositions disclosed herein by other routes, such as subcutaneous injection, intramuscular injection, intradermal injection, transdermal injection percutaneous administration, intranasal administration, intralymphatic injection, rectal administration intragastric administration, intraocular administration, intracerebro-ventricular administration, intrathecally, or any other suitable parenteral administration. In some embodiments, routes for local delivery closer to site of injury or inflammation are preferred over systemic routes. Routes, dosage, time points, and duration of administrating therapeutics may be adjusted. In some embodiments, administration of therapeutics is prior to, or after, onset of either, or both, acute and chronic symptoms of the pathogen-associated disease or condition.

[0180] An effective dose and dosage of the cytoplasts disclosed herein to prevent or treat the disease or condition disclosed herein is defined by an observed beneficial response related to the disease or condition, or symptom of the disease or condition. Beneficial response comprises preventing, alleviating, arresting, or curing the disease or condition, or symptom of the disease or condition. In some embodiments, the beneficial response may be measured by detecting a measurable improvement in the presence, level, or activity, of biomarkers, transcriptomic risk profile, or intestinal microbiome in the subject. An “improvement,” as used herein refers to shift in the presence, level, or activity towards a presence, level, or activity, observed in normal individuals (e.g. individuals who do not suffer from the disease or condition). In instances wherein the cytoplast composition is not therapeutically effective or is not providing a sufficient alleviation of the disease or condition, or symptom of the disease or condition, then the dosage amount and/or route of administration may be changed, or an additional agent may be administered to the subject, along with the cytoplast composition. In some embodiments, as a patient is started on a regimen of a cytoplast composition, the patient is also weaned off (e.g., step-wise decrease in dose) a second treatment regimen.

[0181] Disclosed herein, in some embodiments are formulations of pharmaceutically-acceptable excipients and carrier solutions suitable for delivery of the cytoplast composition described herein, as well as suitable dosing and treatment regimens for using the particular compositions described herein in a variety of treatment regimens. In some embodiments, the amount of therapeutic gene expression product in each therapeutically-useful composition may be prepared is such a way that a suitable dosage will be obtained in any given unit dose of the compound. Factors such as solubility, bioavailability, biological half-life, route of administration, product shelf life, as well as other pharmacological considerations will be contemplated by one skilled in the art of preparing such pharmaceutical formulations, and as such, a variety of dosages and treatment regimens may be desirable. In some embodiments, the cytoplast composition are suitably formulated pharmaceutical compositions disclosed herein, to be delivered either intraocularly, intravitreally, parenterally, subcutaneously, intravenously, intracerebro-ventricularly, intramuscularly, intrathecally, orally, intraperitoneally, by oral or nasal inhalation, or by direct injection to one or more cells, tissues, or organs by direct injection.

[0182] In some embodiments, the pharmaceutical forms of the cytoplast compositions suitable for injectable use include sterile aqueous solutions or dispersions and sterile powders for the extemporaneous preparation of sterile injectable solutions or dispersions. The carrier can be a solvent or dispersion medium containing, for example, water, ethanol, polyol (e.g., glycerol, propylene glycol, and liquid polyethylene glycol, and the like), suitable mixtures thereof, and/or vegetable oils. Proper fluidity may be maintained, for example, by the use of a coating, such as lecithin, by the maintenance of the required particle size in the case of dispersion and by the use of surfactants. The prevention of the action of microorganisms can be brought about by various antibacterial ad antifungal agents, for example, parabens, chlorobutanol, phenol, sorbic acid, thimerosal, and the like. In many cases, it will be preferable to include isotonic agents, for example, sugars or sodium chloride. Prolonged absorption of the injectable compositions can be brought about by the use in the compositions of agents delaying absorption, for example, aluminum monostearate and gelatin.

[0183] In some embodiments, for administration of an injectable aqueous solution, for example, the solution may be suitably buffered, if necessary, and the liquid diluent first rendered isotonic with sufficient saline or glucose. These particular aqueous solutions are especially suitable for intravenous, intramuscular, subcutaneous and intraperitoneal administration. Some variation in dosage will necessarily occur depending on the condition of the subject being treated. The person responsible for administration will, in any event, determine the appropriate dose for the individual subject. Moreover, for human administration, preparations should meet sterility, pyrogenicity, and the general safety and purity standards as required by FDA Office of Biologics standards.

[0184] Other pharmaceutical compositions optionally include one or more preservatives to inhibit microbial activity. Suitable preservatives include mercury-containing substances such as merfen and thiomersal; stabilized chlorine dioxide; and quaternary ammonium compounds such as benzalkonium chloride, cetyltrimethylammonium bromide and cetylpyridinium chloride.

[0185] In one embodiment, the aqueous suspensions and dispersions described herein remain in a homogenous state for at least 4 hours. In one embodiment, an aqueous suspension is re-suspended into a homogenous suspension by physical agitation lasting less than 1 minute. In still another embodiment, no agitation is necessary to maintain a homogeneous aqueous dispersion.

[0186] An aerosol formulation for nasal administration is generally an aqueous solution designed to be administered to the nasal passages in drops or sprays. Nasal solutions can be similar to nasal secretions in that they are generally isotonic and slightly buffered to maintain a pH of about 5.5 to about 6.5, although pH values outside of this range can additionally be used. Antimicrobial agents or preservatives can also be included in the formulation.

[0187] An aerosol formulation for inhalations and inhalants can be designed so that the agent or combination of agents is carried into the respiratory tree of the subject when administered by the nasal or oral respiratory route. Inhalation solutions can be administered, for example, by a nebulizer. Inhalations or insufflations, comprising finely powdered or liquid drugs, can be delivered to the respiratory system as a pharmaceutical aerosol of a solution or suspension of the agent or combination of agents in a propellant, e.g., to aid in disbursement. Propellants can be liquefied gases, including halocarbons, for example, fluorocarbons such as fluorinated chlorinated hydrocarbons, hydrochlorofluorocarbons, and hydrochlorocarbons, as well as hydrocarbons and hydrocarbon ethers.

[0188] Halocarbon propellants can include fluorocarbon propellants in which all hydrogens are replaced with fluorine, chlorofluorocarbon propellants in which all hydrogens are replaced with chlorine and at least one fluorine, hydrogen-containing fluorocarbon propellants, and hydrogen-containing chlorofluorocarbon propellants. Hydrocarbon propellants useful include, for example, propane, isobutane, n-butane, pentane, isopentane and neopentane. A blend of hydrocarbons can also be used as a propellant. Ether propellants include, for example, dimethyl ether as well as the ethers. An aerosol formulation can also comprise more than one propellant. For example, the aerosol formulation can comprise more than one propellant from the same class, such as two or more fluorocarbons; or more than one, more than two, more than three propellants from different classes, such as a fluorohydrocarbon and a hydrocarbon. Pharmaceutical compositions of the present disclosure can also be dispensed with a compressed gas, e.g., an inert gas such as carbon dioxide, nitrous oxide or nitrogen.

[0189] Aerosol formulations can also include other components, for example, ethanol, isopropanol, propylene glycol, as well as surfactants or other components such as oils and detergents. These components can serve to stabilize the formulation and/or lubricate valve components.

[0190] The aerosol formulation can be packaged under pressure and can be formulated as an aerosol using solutions, suspensions, emulsions, powders and semisolid preparations. For example, a solution aerosol formulation can comprise a solution of an agent such as a transporter, carrier, or ion channel inhibitor in (substantially) pure propellant or as a mixture of propellant and solvent. The solvent can be used to dissolve the agent and/or retard the evaporation of the propellant. Solvents can include, for example, water, ethanol and glycols. Any combination of suitable solvents can be use, optionally combined with preservatives, antioxidants, and/or other aerosol components.

[0191] An aerosol formulation can be a dispersion or suspension. A suspension aerosol formulation can comprise a suspension of an agent or combination of agents, e.g., a transporter, carrier, or ion channel inhibitor, and a dispersing agent. Dispersing agents can include, for example, sorbitan trioleate, oleyl alcohol, oleic acid, lecithin and corn oil. A suspension aerosol formulation can also include lubricants, preservatives, antioxidant, and/or other aerosol components.

[0192] An aerosol formulation can similarly be formulated as an emulsion. An emulsion aerosol formulation can include, for example, an alcohol such as ethanol, a surfactant, water and a propellant, as well as an agent or combination of agents, e.g., a transporter, carrier, or ion channel. The surfactant used can be nonionic, anionic or cationic. One example of an emulsion aerosol formulation comprises, for example, ethanol, surfactant, water and propellant. Another example of an emulsion aerosol formulation comprises, for example, vegetable oil, glyceryl monostearate and propane.

[0193] Disclosed herein are sterile injectable solutions comprising the cytoplast composition disclosed herein, which are prepared by incorporating the cytoplast composition disclosed herein in the required amount in the appropriate solvent with several of the other ingredients enumerated above, as required, followed by filtered sterilization. Generally, dispersions are prepared by incorporating the various sterilized active ingredients into a sterile vehicle which contains the basic dispersion medium and the required other ingredients from those enumerated above. In the case of sterile powders for the preparation of sterile injectable solutions, the preferred methods of preparation are vacuum-drying and freeze-drying techniques which yield a powder of the active ingredient plus any additional desired ingredient from a previously sterile-filtered solution thereof.

[0194] In some embodiments, the compositions disclosed herein may also be formulated in a neutral or salt form. Pharmaceutically-acceptable salts include the acid addition salts (formed with the free amino groups of the protein) and which are formed with inorganic acids such as, for example, hydrochloric or phosphoric acids, or such organic acids as acetic, oxalic, tartaric, mandelic, and the like. Salts formed with the free carboxyl groups can also be derived from inorganic bases such as, for example, sodium, potassium, ammonium, calcium, or ferric hydroxides, and such organic bases as isopropylamine, trimethylamine, histidine, procaine and the like. Upon formulation, solutions will be administered in a manner compatible with the dosage formulation and in such amount as is therapeutically effective. The formulations are easily administered in a variety of dosage forms such as injectable solutions, drug-release capsules, and the like.

[0195] Suitable dose and dosage administrated to a subject is determined by factors including, but not limited to, the particular cytoplast composition, disease condition and its severity, the identity (e.g., weight, sex, age) of the subject in need of treatment, and can be determined according to the particular circumstances surrounding the case, including, e.g., the specific agent being administered, the route of administration, the condition being treated, and the subject or host being treated.

[0196] The amount cytoplast compositions and time of administration of such compositions will be within the purview of the skilled artisan having benefit of the present teachings. It is likely, however, possible that administration of therapeutically-effective amounts of the disclosed compositions may be achieved by a single administration, such as for example, a single injection of sufficient numbers of cytoplasts to provide therapeutic benefit to the patient undergoing such treatment.

[0197] Alternatively, in some circumstances, it may be desirable to provide multiple, or successive administrations of the cytoplast compositions, either over a relatively short, or a relatively prolonged period of time, as may be determined by the medical practitioner overseeing the administration of such compositions. For example, the number of cytoplasts administered to a mammal may be on the order of about 10⁷, 10⁸, 10⁹, 10¹⁰, 10¹¹, 10¹², 10¹³, or even higher, cytoplasts given either as a single dose, or divided into two or more administrations as may be required to achieve therapy of the particular disease or disorder being treated. In fact, in certain embodiments, it may be desirable to administer two or more different cytoplast compositions, either alone, or in combination with one or more other therapeutic drugs to achieve the desired effects of a particular therapy regimen. In various embodiments, the daily and unit dosages are altered depending on a number of variables including, but not limited to, the activity of the cytoplast composition used, the disease or condition to be treated, the mode of administration, the requirements of the individual subject, the severity of the disease or condition being treated, and the judgment of the practitioner.

[0198] In some embodiments, the administration of the cytoplast composition is hourly, once every 2 hours, 3 hours, 4 hours, 5 hours, 6 hours,? hours, 8 hours, 9 hours, 10 hours, 11 hours, 12 hours, 13 hours, 14 hours, 15 hours, 16 hours, 17 hours, 18 hours, 19 hours, 20 hours, 21 hours 22 hours, 23 hours, 1 day, 2 days, 3 days, 4 days, 5 days, 6 days, 7 days, 8 days, 9 days, 10 days, 11 days, 12 days, 13 days, 14 days, 15 days, 1 month, 2 months, 3 months, 4 months, 5 months, 6 months, 7 months, 8 months, 9 months, 10 months, 11 months, 1 year, 2 years, 3 years, 4 years, or 5 years, or 10 years. The effective dosage ranges may be adjusted based on subject's response to the treatment. Some routes of administration will require higher concentrations of effective amount of therapeutics than other routes.

[0199] Although not anticipated given the advantages of the present disclosure, in certain embodiments wherein the patient's condition does not improve, upon the doctor's discretion the administration of cytoplast composition is administered chronically, that is, for an extended period of time, including throughout the duration of the patient's life in order to ameliorate or otherwise control or limit the symptoms of the patient's disease or condition. In certain embodiments wherein a patient's status does improve, the dose of cytoplast composition being administered may be temporarily reduced or temporarily suspended for a certain length of time (i.e., a “drug holiday”). In specific embodiments, the length of the drug holiday is between 2 days and 1 year, including by way of example only, 2 days, 3 days, 4 days, 5 days, 6 days, 7 days, 10 days, 12 days, 15 days, 20 days, 28 days, or more than 28 days. The dose reduction during a drug holiday is, by way of example only, by 10%-100%, including by way of example only 10%, 15%, 20%, 25%, 30%, 35%, 40%, 45%, 50%, 55%, 60%, 65%, 70%, 75%, 80%, 85%, 90%, 95%, and 100%. In certain embodiments, the dose of drug being administered may be temporarily reduced or temporarily suspended for a certain length of time (i.e., a “drug diversion”). In specific embodiments, the length of the drug diversion is between 2 days and 1 year, including by way of example only, 2 days, 3 days, 4 days, 5 days, 6 days, 7 days, 10 days, 12 days, 15 days, 20 days, 28 days, or more than 28 days. The dose reduction during a drug diversion is, by way of example only, by 10%-100%, including by way of example only 10%, 15%, 20%, 25%, 30%, 35%, 40%, 45%, 50%, 55%, 60%, 65%, 70%, 75%, 80%, 85%, 90%, 95%, and 100%. After a suitable length of time, the normal dosing schedule is optionally reinstated.

[0200] In some embodiments, once improvement of the patient's conditions has occurred, a maintenance dose is administered if necessary. Subsequently, in specific embodiments, the dosage or the frequency of administration, or both, is reduced, as a function of the symptoms, to a level at which the improved disease, disorder or condition is retained. In certain embodiments, however, the patient requires intermittent treatment on a long-term basis upon any recurrence of symptoms.

[0201] Toxicity and therapeutic efficacy of such therapeutic regimens are determined by standard pharmaceutical procedures in cell cultures or experimental animals, including, but not limited to, the determination of the LD50 and the ED50. The dose ratio between the toxic and therapeutic effects is the therapeutic index and it is expressed as the ratio between LD50 and ED50. In certain embodiments, the data obtained from cell culture assays and animal studies are used in formulating the therapeutically effective daily dosage range and/or the therapeutically effective unit dosage amount for use in mammals, including humans. In some embodiments, the dosage amount of the cytoplast composition described herein lies within a range of circulating concentrations that include the ED50 with minimal toxicity. In certain embodiments, the daily dosage range and/or the unit dosage amount varies within this range depending upon the dosage form employed and the route of administration utilized.

[0202] E. Pathogen Trapping Cytoplasts

[0203] Disclosed herein, in some embodiments, is a cytoplast engineered to trap a pathogen by permitting the pathogen to infect the cytoplast and preventing the pathogen from propagating or replicating within the cytoplast. The controllable and finite lifespan of the cytoplast enables the cytoplast to kill the pathogen when the cytoplast dies having the pathogen trapped in the cytoplast at death. Death of the cytoplast can be a natural process, such through apoptosis or autophagy. The cytoplasts engineered to trap a pathogen can be engineered to express pathogen-recognized moieties, such as a host receptor, that encourages infection of the cytoplast by the pathogen. In addition, or alternatively, the cytoplast can be engineered to express or contain an active agent described herein that is therapeutically effective to treat or prevent an infection by the pathogen in cell of a subject. Such active agents, for example, can be neutralizing antibodies that, when secreted from the cytoplast, functionally block binding between the pathogen in extracellular space and host cells. In the case of preventing an infection by a SARS-CoV-2, the neutralizing antibodies block binding between the SARS-CoV-2 spike protein and the human angiotensin-converting enzyme 2 (ACE2) expressed on the host cell to prevent infection.

[0204] A pathogen can be any bacteria, virus, or fungus that can infect a cell described herein that, at least partially, requires nuclear genetic information to replicate or propagate, such as those disclosed herein. The infected cytoplast lacks nuclear components needed for replication or propagation of pathogens that have replicative stages in the nuclei of a host cell, thus decreasing preventing or treating the infection by the pathogen in a subject.

[0205] In the case for reducing or preventing an infection by SARS-CoV-2, the cytoplast is engineered to express a pathogen-recognized moiety for SARS-CoV-2 (e.g., ACE2), and when the cytoplast is infected by SARS-CoV-2 via spike protein and ACE2 binding, the cytoplast can naturally, or be engineered to, recruit macrophages for macrophage phagocytosis. As seen in FIG. 4, as a non-limiting example, the phagocytosis of the infected cytoplast can activate immune cells such as helper T cells and B cells to generate antibodies against SARS-CoV-2. In some embodiments, the phagocytosis of the infected cytoplast can activate T cells for treating the viral infection.

[0206] The cytoplasts described herein, in some embodiments, are engineered to express, and in some cases, display a pathogen-recognized moiety. In some embodiments, the pathogen-recognized moiety is a host receptor (a cognate receptor for the pathogen of interest), or a portion thereof sufficient to facilitate binding between the pathogen and the host cell. The pathogen-recognized moiety may be expressed by the cytoplast on the surface of the cytoplast. In some embodiments, the pathogen-recognized moiety is derived from a protein that is at least partially exposed to an extracellular environment. In some embodiments, the pathogen-recognized moiety is derived from a polypeptide encoding a cell surface receptor or a transmembrane protein. In some embodiments, pathogen-recognized moiety is derived from a protein that is bound by a viral protein during viral infection. For example, the pathogen-recognized moiety may be derived from the Angiotensin I Converting Enzyme 2 (ACE2), which is bound by the Spike protein of the SARS-CoV-2 during viral infection. In some embodiments, the pathogen-recognized moiety is derived from a cell surface receptor or a transmembrane protein that can be recognized and bound by any one of the virus described herein. In some embodiments, the pathogen-recognized moiety is derived from a cell surface receptor or a transmembrane protein that can be recognized and bound by any one of the coronavirus described herein. In some embodiments, the pathogen-recognized moiety is a sugar. In some embodiments, the pathogen-recognized moiety is a polypeptide. Non-limiting receptors that are recognized by a coronavirus include ACE2, Alanine aminopeptidase (ANPEP), Carcinoembryonic antigen-related cell adhesion molecule (CEACAM1), Dipeptidyl peptidase-4 (DPP4), or a sugar.

[0207] In some embodiments, the cytoplast is engineered to express human angiotensin-converting enzyme 2 (ACE2), or a portion thereof, which can be recognized and bound by a coronavirus specific to ACE2, such as for example, SARS-CoV, SARS-CoV-2, and NL63. In some embodiments, the cytoplast is engineered to express the ACE2, or portion thereof, on the surface of the cytoplast. In some embodiments, the cytoplast is engineered to express full length of ACE2. In some embodiments, the cytoplast is engineered to express a fragment of ACE2. In some embodiments, the portion of the ACE2 comprises between about 5 amino acids to about 805 amino acids of an amino acid sequence of the ACE2 polypeptide. In some embodiments, the pathogen-recognized moiety comprising the portion of the ACE2 is derived from the extracellular domain or the portion of the ACE2 that is expressed on the outside of the cell. In some embodiments, the portion of the ACE2 comprises a N-terminus portion of the amino acid sequence of ACE2. In some embodiments, the portion of the ACE2 comprises a C-terminus portion of the amino acid sequence of ACE2. In some embodiments, the portion of the ACE2 comprises an amino acid sequence of the ACE2 polypeptide comprising between about 5 amino acids to about 10 amino acids, about 5 amino acids to about 15 amino acids, about 5 amino acids to about 20 amino acids, about 5 amino acids to about 25 amino acids, about 5 amino acids to about 50 amino acids, about 5 amino acids to about 100 amino acids, about 5 amino acids to about 200 amino acids, about 5 amino acids to about 400 amino acids, about 5 amino acids to about 500 amino acids, about 5 amino acids to about 600 amino acids, about 5 amino acids to about 805 amino acids, about 10 amino acids to about 15 amino acids, about 10 amino acids to about 20 amino acids, about 10 amino acids to about 25 amino acids, about 10 amino acids to about 50 amino acids, about 10 amino acids to about 100 amino acids, about 10 amino acids to about 200 amino acids, about 10 amino acids to about 400 amino acids, about 10 amino acids to about 500 amino acids, about 10 amino acids to about 600 amino acids, about 10 amino acids to about 805 amino acids, about 15 amino acids to about 20 amino acids, about 15 amino acids to about 25 amino acids, about 15 amino acids to about 50 amino acids, about 15 amino acids to about 100 amino acids, about 15 amino acids to about 200 amino acids, about 15 amino acids to about 400 amino acids, about 15 amino acids to about 500 amino acids, about 15 amino acids to about 600 amino acids, about 15 amino acids to about 805 amino acids, about 20 amino acids to about 25 amino acids, about 20 amino acids to about 50 amino acids, about 20 amino acids to about 100 amino acids, about 20 amino acids to about 200 amino acids, about 20 amino acids to about 400 amino acids, about 20 amino acids to about 500 amino acids, about 20 amino acids to about 600 amino acids, about 20 amino acids to about 805 amino acids, about 25 amino acids to about 50 amino acids, about 25 amino acids to about 100 amino acids, about 25 amino acids to about 200 amino acids, about 25 amino acids to about 400 amino acids, about 25 amino acids to about 500 amino acids, about 25 amino acids to about 600 amino acids, about 25 amino acids to about 805 amino acids, about 50 amino acids to about 100 amino acids, about 50 amino acids to about 200 amino acids, about 50 amino acids to about 400 amino acids, about 50 amino acids to about 500 amino acids, about 50 amino acids to about 600 amino acids, about 50 amino acids to about 805 amino acids, about 100 amino acids to about 200 amino acids, about 100 amino acids to about 400 amino acids, about 100 amino acids to about 500 amino acids, about 100 amino acids to about 600 amino acids, about 100 amino acids to about 805 amino acids, about 200 amino acids to about 400 amino acids, about 200 amino acids to about 500 amino acids, about 200 amino acids to about 600 amino acids, about 200 amino acids to about 805 amino acids, about 400 amino acids to about 500 amino acids, about 400 amino acids to about 600 amino acids, about 400 amino acids to about 805 amino acids, about 500 amino acids to about 600 amino acids, about 500 amino acids to about 805 amino acids, or about 600 amino acids to about 805 amino acids. In some embodiments, the portion of the ACE2 comprises between about 5 amino acids, about 10 amino acids, about 15 amino acids, about 20 amino acids, about 25 amino acids, about 50 amino acids, about 100 amino acids, about 200 amino acids, about 400 amino acids, about 500 amino acids, about 600 amino acids, or about 805 amino acids, of the amino acid sequence of the ACE2 polypeptide. In some embodiments, the portion of the ACE2 comprises at least or equal to about 5 amino acids, about 10 amino acids, about 15 amino acids, about 20 amino acids, about 25 amino acids, about 50 amino acids, about 100 amino acids, about 200 amino acids, about 400 amino acids, about 500 amino acids, or about 600 amino acids, of the amino acid sequence of the ACE2 polypeptide. In some embodiments, the portion of the ACE2 comprises at most about 10 amino acids, about 15 amino acids, about 20 amino acids, about 25 amino acids, about 50 amino acids, about 100 amino acids, about 200 amino acids, about 400 amino acids, about 500 amino acids, about 600 amino acids, or about 805 amino acids, of the amino acid sequence of the ACE2 polypeptide. In some embodiments, the ACE2 is human ACE2 (huACE2). In some embodiments, the amino acid sequence for huACE2 is provided in SEQ ID NO: 12.

[0208] In some embodiments, the cytoplast is engineered to express a heterologous polypeptide that is at least or equal to 50%, 60%, 70%, 80%, 90%, 95%, or 99% identical to SEQ ID NO: 12. In some embodiments, the cytoplast is engineered to express a heterologous polypeptide that is at least or equal to 50%, 60%, 70%, 80%, 90%, 95%, or 99% identical to a fragment of SEQ ID NO: 12. In some embodiments, the cytoplast is engineered to express a heterologous polypeptide that is 100% identical to SEQ ID NO: 12. In some embodiments, the cytoplast is engineered to express a heterologous polypeptide that is 100% identical to a fragment of SEQ ID NO: 12.

[0209] In some embodiments, the cytoplast can be engineered to express more ACE2 compared to a cell that expresses ACE2 at an endogenous level and can be infected by SARS-CoV-2. In some embodiments, the cytoplast can express at least or equal to 10%, 20%, 30% 40%, 50%, 60%, 70%, 80%, 90%, 95%, 99%, or more ACE2 compared to the cell expressing the ACE2 at the endogenous level. In some embodiments, the cytoplast can express at least or equal to 2 folds, 5 folds, 10 folds, 50 folds, 100 folds, 500 folds, 1000 folds, 5000 folds, 10000 folds, or more folds ACE2 compared to the cell that expresses ACE at the endogenous level and can be infected by SARS-CoV-2. In some embodiments, the cytoplast can be engineered to express more ACE2 on the surface of the cytoplast compared to a cell expressing ACE2 at the endogenous level on the surface of the cell. In some embodiments, the cytoplast can express at least or equal to 10%, 20%, 30% 40%, 50%, 60%, 70%, 80%, 90%, 95%, 99%, or more ACE2 on the surface or the cytoplast compared to the cell expressing ACE2 at the endogenous level on the surface of the cell. In some embodiments, the cytoplast can express at least or equal to 2 folds, 5 folds, 10 folds, 50 folds, 100 folds, 500 folds, 1000 folds, 5000 folds, 10000 folds, or more folds of ACE2 on the surface of the cytoplast compared to the cell expressing ACE2 at the endogenous level on the surface of the cell.

[0210] In some embodiments, the cytoplast expressing ACE2 can have higher viral infectivity as compared to a reference cell. A “reference cell” in this context can be a naturally occurring cell capable of being infected by SARS-CoV-2 (e.g., naturally expresses ACE2). In some embodiments, the reference cell is the same cell type as the cytoplast. In some embodiments, the reference cell is an otherwise identical to the cytoplast, except that it does not express ACE2. Viral infectivity can be measured and determined by assays commonly known. Exemplary measurements of viral infectivity can include viral plaque assay, fluorescent focus assay (FFA) and endpoint dilution assay (TCID50). Each of these assays can rely on serial viral dilutions added to cytoplast and/or cell to measure viral infectivity. Other exemplary measurements for determining viral infectivity can include qPCR or ELISA for quantifying the amount of viral genome or particle necessary to infect a set number of cytoplasts and/or cells. In some embodiments, the cytoplast expressing ACE2 can have viral infectivity at least or equal to about 10%, 20%, 30% 40%, 50%, 60%, 70%, 80%, 90%. In some embodiments, the cytoplast expressing ACE2 can have a viral infectivity that at least or equal to about 2 fold, 5 fold, 10 fold, 50 fold, 100 fold, 500 fold, 1000 fold, 5000 fold, or 10000 fold higher than the reference cell.

[0211] Described herein, in some embodiments, are cytoplasts engineered to express at least one targeting moiety, such as a homing protein or receptor. In some embodiments, the targeting moiety is secreted by the cytoplast. In some embodiments, the targeting moiety is a ligand for the chemokine receptor described herein. In some embodiments, the targeting moiety is a cytokine described herein. In some embodiments, the targeting moiety is a homing receptor. In some embodiments, the targeting moiety is expressed on the surface of the cytoplast. In some embodiments, the targeting moiety is a chemokine receptor described herein. In some embodiments, the targeting moiety is a receptor for any one of the cytokine described herein.

[0212] In some embodiments, the targeting moiety can be specific to one or more ligands expressed on one or more cells in lymph tissue, cells in the lymph tissue can comprise endothelial cells, lymphocytes, macrophages, or reticular cells, or a combination thereof. Non-limiting examples of the secreted targeting moiety include SDF1α, CCL2, CCL3, CCL5, CCL8, CCL1, CXCL9, CXCL10, CCL11, CXCL12, or a combination thereof. In some embodiments, the targeting moiety is expressed on the surface of the cytoplast. Non-limiting examples of the targeting moiety expressed on the surface of the cytoplast include CXCR4, CCR2 or PSGL-1. Non-limiting examples of cell surface proteins that may be expressed on the cell surface include CXCR4, CCR2, CCR1, CCRS, CXCR7, CXCR2, CXCR1, C-X-C chemokine receptor type 3, leukosialin, CD44 antigen, C-C chemokine receptor type 7, L-selectin, lymphocyte function-associated antigen 1, or very late antigen-4, or a combination thereof.

[0213] In some embodiments, the cytoplast expressing the targeting moiety (e.g., homing protein or homing receptor) also expresses an active agent disclosed herein. In some embodiments, the active agent is an additional exogenous agent described herein. In some embodiments, the active agent is pathogen-recognized moiety described herein. In some embodiments, the active agent comprises an antibody or single-domain antibody that binds to: an epitope expressed by the pathogen; an epitope associated with a microenvironment associated with the pathogen; or an epitope associated with a biomolecule released by the pathogen. In some embodiments, the binding of the antibody or single-domain antibody to the epitope confers therapeutic or vaccination properties against the pathogen. In some embodiments, the binding of the antibody or single-domain antibody to the epitope recruits immune cells to activate immune response to confer therapeutic properties against the pathogen.

### II. METHODS OF TREATMENT AND PREVETION

[0214] Provided herein are methods of treating or preventing a pathogen-associated disease or a condition by administering a cytoplast or pharmaceutical composition containing the cytoplast, of the present disclosure to a subject in need thereof. In some embodiments, the cytoplasts and pharmaceutical compositions thereof are suitable for treatment of a disease or a condition described herein. Such disease or condition may, in some cases, be caused (at least in part) by an infection by a pathogen described herein. In some embodiments, the disease or the condition is cancer, such as for example, caused by an infection by an oncolytic virus.

[0215] In some embodiments, methods comprise administering the cytoplast or pharmaceutical composition containing the cytoplast to a subject systemically.

[0216] Disclosed herein, in some embodiments, are methods of treating cancer by administering to a subject in need thereof a cytoplast or a pharmaceutical composition containing the cytoplast to the subject. In some embodiments, the cytoplast comprises an exogenous nucleic acid encoding an anti-cancer active agent. In some embodiments, the anti-cancer active agent is a vaccine against an oncolytic virus. In some embodiments, the cytoplast is engineered to express an antibody or small molecule specific to a cancer cell. In some embodiments, the antibody may be a neutralizing antibody may target the cancer cell and subsequently activate the adaptive immune system to neutralize the cancer cell. In some embodiments, the antibody may be a single-domain antibody (e.g., a nanobody). In some embodiments, the antibody may be conjugated to a drug such as a cytotoxic drug to form an antibody drug conjugate (ADC). In some embodiments, the cytoplast confers therapeutic properties by directly contacting the cancer cell. In some embodiments, the cytoplast confers therapeutic properties by recruiting and activating immune response (e.g., immune cells) to the cancer cell.

[0217] Also disclosed are methods of vaccinating a subject against a pathogen described herein. In some embodiments, the cytoplast is engineered to express a pathogen antigen for uses as a pathogen vaccine. In some embodiments, the pathogen may be any one of the pathogens selected from Tables 3-6. In some embodiments, the cytoplast is engineered to express an antigen of any one of the pathogens selected from Tables 3-6. In some embodiments, the antigen comprises an amino acid sequence that is at least or equal to about 50%, 60%, 70%, 75%, 80%, 85%, 90%, 95%, or 99% identical to one or more of SEQ ID NOs: 1, 3-7, 151-154, 251-260, 401-447, 551-562, 651-660, 751-761, 851-859, 951-984, 1051-1057, or 1151-1153. In some embodiments, the antigen is encoded from a nucleic acid sequence that is at least or equal to about 50%, 60%, 70%, 75%, 80%, 85%, 90%, 95%, or 99% identical to one or more of SEQ ID NOs: 2, 8, 101-104, 201-209, 301-347, 501-512, 601-610, 701-711, 801-809, 901-934, 1001-1007, or 1101-1103. In some embodiments, the cytoplast is engineered to express a viral antigen for use as a viral vaccine. In some embodiments, the cytoplast is engineered to express a bacterial antigen for use as a bacterial vaccine.

[0218] Also described herein are method for treating a subject against a pathogen infection. In some embodiments, the cytoplast is engineered to express an antibody or small molecule specific to a pathogen, that is effective to reduce the pathogen in a subject in need thereof. In some embodiments, the antibody may be a neutralizing antibody that may target the pathogen and subsequently activate the adaptive immune system to neutralize the pathogen. In some embodiments, the antibody can be a single-domain antibody (e.g., a nanobody). In some embodiments, the antibody can be conjugated to a drug such as a cytotoxic drug to form an antibody drug conjugate (ADC). In some embodiments, the cytoplast confers therapeutic properties by directly contacting the pathogen. In some embodiments, the cytoplast confers therapeutic properties by recruiting and activating immune response (e.g., immune cells) to the pathogen.

[0219] Disclosed herein, in some embodiments, are methods of treating an infection by a pathogen in a subject, by administering the cytoplast or the pharmaceutical composition containing the cytoplast to the subject, wherein the cytoplast is engineered to trap pathogen in any tissue (e.g., blood, muscle, or lymph) of a subject, prevent propagation of the pathogen in the subject, and optionally, clear the pathogen from the subject, such as for example, by phagocytosis. In some embodiments, the cytoplast is engineered to express a therapeutic agent that is effective to treat the pathogen-associated disease or condition. In some embodiments, the cytoplast is engineered to express a therapeutic agent that is effective to treat cancer. In some embodiments, the method further includes administering to the subject one or more additional therapeutic agents. In some embodiments, the one or more additional therapeutic agents is selected from the group consisting of: cell-based therapy, a small molecule, immuno-therapy, chemotherapy, radiation therapy, gene therapy, and surgery. The additional therapy may be administered to the subject simultaneously with the cytoplasts of the present disclosure. The additional therapy may be administered before or after the cytoplasts of the present disclosure.

[0220] A. Disease or Condition

[0221] The pathogen-associated disease or condition disclosed herein includes viral infections, bacterial infections, fungal infections, parasitic infections, and protozoal infections, and diseased or condition associated with an infection disclosed herein. In some embodiments, the pathogen may selected from any one of the pathogens listed in Tables 3-6. Non-limiting examples of infections that may be treated or prevented by the compositions and methods utilizing the compositions described herein may include Acinetobacter infections, Actinomycosis, African sleeping sickness (African trypanosomiasis), AIDS (Acquired immunodeficiency syndrome), Amebiasis, Anaplasmosis, Angiostrongyliasis, Anisakiasis, Anthrax, Arcanobacterium haemolyticum infection, Argentine hemorrhagic fever, Ascariasis, Aspergillosis, Astrovirus infection, Babesiosis, Bacillus cereus infection, Bacterial pneumonia, Bacterial vaginosis, Bacteroides infection, Balantidiasis, Bartonellosis, Baylisascaris infection, BK virus infection, Black piedra, Blastocystosis, Blastomycosis, Bolivian hemorrhagic fever, Botulism (and Infant botulism), Brazilian hemorrhagic fever, Brucellosis, Bubonic plague, Burkholderia infection, Buruli ulcer, Calicivirus infection (Norovirus and Sapovirus), Campylobacteriosis, Candidiasis (Moniliasis; Thrush), Capillariasis, Carrion's disease, Cat-scratch disease, Cellulitis, Chagas Disease (American trypanosomiasis), Chancroid, Chickenpox, Chikungunya, Chlamydia, Chlamydophila pneumoniae c infection (Taiwan acute respiratory agent or TWAR), Cholera, Chromoblastomycosis, Chytridiomycosis, Clonorchiasis, Clostridium difficile colitis, Coccidioidomycosis, Colorado tick fever (CTF), Common cold (Acute viral rhinopharyngitis; Acute coryza), Coronavirus infection, Creutzfeldt—Jakob disease (CJD), Crimean-Congo hemorrhagic fever (CCHF), Cryptococcosis, Cryptosporidiosis, Cutaneous larva migrans (CLM), Cyclosporiasis, Cysticercosis, Cytomegalovirus infection, Dengue fever, Desmodesmus infection, Dientamoebiasis, Diphtheria, Diphyllobothriasis, Dracunculiasis, Ebola hemorrhagic fever, Echinococcosis, Ehrlichiosis, Enterobiasis (Pinworm infection), Enterococcus infection, Enterovirus infection, Epidemic typhus, Erythema infectiosum (Fifth disease), Exanthem subitum (Sixth disease), Fasciolasis, Fasciolopsiasis, Fatal familial insomnia (FFI), Filariasis, Food poisoning by Clostridium perfringens, Free-living amebic infection, Fusobacterium infection, Gas gangrene (Clostridial myonecrosis), Geotrichosis, Gerstmann-Straussler-Scheinker syndrome (GSS), Giardiasis, Glanders, Gnathostomiasis, Gonorrhea, Granuloma inguinale (Donovanosis), Group A streptococcal infection, Group B streptococcal infection, Haemophilus infection, Hand, foot and mouth disease (HFMD), Hantavirus Pulmonary Syndrome (HPS), Heartland virus disease, Helicobacter pylori infection, Hemolytic-uremic syndrome (HUS), Hemorrhagic fever with renal syndrome (HFRS), Hepatitis A, Hepatitis B, Hepatitis C, Hepatitis D, Hepatitis E, Herpes simplex, Histoplasmosis, Hookworm infection, Human bocavirus infection, Human ewingii ehrlichiosis, Human granulocytic anaplasmosis (HGA), Human immnunodeficiency virus (HIV) infection, Human metapneumovirus infection, Human monocytic ehrlichiosis, Human papillomavirus (HPV) infection, Human parainfluenza virus infection, Hymenolepiasis, Epstein—Barr virus infectious mononucleosis (Mono), Influenza (flu), influenza virus A, influenza virus B, influenza virus C, influenza virus D, influenza virus pr8, Isosporiasis, Kawasaki disease, Keratitis, Kingella kingae infection, Kuru, Lassa fever, Legionellosis (Legionnaires' disease), Legionellosis (Pontiac fever), Leishmaniasis, Leprosy, Leptospirosis, Listeriosis, Lyme disease (Lyme borreliosis), Lymphatic filariasis (Elephantiasis), Lymphocytic choriomeningitis, Malaria, Marburg hemorrhagic fever (MHF), Measles, Middle East respiratory syndrome (MERS), Melioidosis (Whitmore's disease), Meningitis, Meningococcal disease, Metagonimiasis, Microsporidiosis, Molluscum contagiosum (MC), Monkeypox, Mumps, Murine typhus (Endemic typhus), Mycoplasma pneumonia, Mycoplasma genitalium infection, Mycetoma (disambiguation), Myiasis, Neonatal conjunctivitis (Ophthalmia neonatorum), Norovirus (children and babies), (New) Variant Creutzfeldt-Jakob disease (vCJD, nvCJD), Nocardiosis, Onchocerciasis (River blindness), Opisthorchiasis, Paracoccidioidomycosis (South American blastomycosis), Paragonimiasis, Pasteurellosis, Pediculosis capitis (Head lice), Pediculosis corporis (Body lice), Pediculosis pubis (Pubic lice, Crab lice), Pelvic inflammatory disease (PID), Pertussis (Whooping cough), Plague, Pneumococcal infection, Pneumocystis pneumonia (PCP), Pneumonia, Poliomyelitis, Prevotella infection, Primary amoebic meningoencephalitis (PAM), Progressive multifocal leukoencephalopathy, Psittacosis, Q fever, Rabies, Relapsing fever, Respiratory syncytial virus infection, Rhinosporidiosis, Rhinovirus infection, Rickettsial infection, Rickettsialpox, Rift Valley fever (RVF), Rocky Mountain spotted fever (RMSF), Rotavirus infection, Respiratory Syncytial virus (RSV), Rubella, Salmonellosis, SARS (Severe Acute Respiratory Syndrome), Scabies, Scarlet fever, Schistosomiasis, Sepsis, Shigellosis (Bacillary dysentery), Shingles (Herpes zoster), Smallpox (Variola), Sporotrichosis, Staphylococcal food poisoning, Staphylococcal infection, Strongyloidiasis, Subacute sclerosing panencephalitis, Syphilis, Taeniasis, Tetanus (Lockjaw), Tinea barbae (Barber's itch), Tinea capitis (Ringworm of the Scalp), Tinea corporis (Ringworm of the Body), Tinea cruris (Jock itch), Tinea manum (Ringworm of the Hand), Tinea nigra, Tinea pedis (Athlete's foot), Tinea unguium (Onychomycosis), Tinea versicolor (Pityriasis versicolor), Toxocariasis (Ocular Larva Migrans (OLM)), Toxocariasis (Visceral Larva Migrans (VLM)), Toxoplasmosis, Trachoma, Trichinosis, Trichomoniasis, Trichuriasis (Whipworm infection), Tuberculosis, Tularemia, Typhoid fever, Typhus fever, Ureaplasma urealyticum infection, Valley fever, Venezuelan equine encephalitis, Venezuelan hemorrhagic fever, Vibrio vulnificus infection, Vibrio parahaemolyticus enteritis, Viral pneumonia, West Nile Fever, White piedra (Tinea blanca), Yersinia pseudotuberculosis infection, Yersiniosis, Yellow fever, Zika fever, and Zygomycosis.

[0222] The coronavirus infection may be an infection by an alpha coronavirus or a beta coronavirus. Non-limiting examples of alpha coronavirus include 229E and NL63. Non-limiting examples of beta coronavirus include OC43, HKU1, severe acute respiratory syndrome (SARS) coronavirus, or Middle East Respiratory Syndrome (MERS) coronavirus. In some embodiments, the SARS coronavirus is SARS-CoV, SARS-CoV-2, or a variant thereof. In some embodiments, the MERS coronavirus is MERS-CoV or a variant thereof. In some embodiments, the SARS coronavirus causes a disease or a condition, such as coronavirus disease 2019 (COVID-19).

[0223] The coronavirus described herein, in some embodiments, is encoded by a nucleic acid sequence provided in any one of SEQ ID NOs: 1 and 3-7. In some embodiments, the coronavirus (or variant thereof) is encoded by a nucleic acid sequence that is at least about 70%, 75%, 80%, 81%, 82%, 83%, 84%, 85%, 86%, 87%, 88%, 89%, 90%, 91%, 92%, 93%, 94%, 95%, 96%, 97%, 98%, or 99% identical to any one of SEQ ID NOs: 1 and 3-7.

[0224] In some embodiments, the coronavirus comprises a spike protein encoded an amino acid sequence provided in SEQ ID NO: 2 or 8. In some embodiments, the S protein is encoded by an amino acid sequence that is at least about 70%, 75%, 80%, 81%, 82%, 83%, 84%, 85%, 86%, 87%, 88%, 89%, 90%, 91%, 92%, 93%, 94%, 95%, 96%, 97%, 98%, or 99% identical to SEQ ID NO: 2 or 8.

[0225] In some embodiments, the coronavirus comprises a nucleocapsid (N) protein encoded by an amino acid sequence provided in SEQ ID NO: 9. In some embodiments, the N protein is encoded by an amino acid sequence that is at least about 70%, 75%, 80%, 81%, 82%, 83%, 84%, 85%, 86%, 87%, 88%, 89%, 90%, 91%, 92%, 93%, 94%, 95%, 96%, 97%, 98%, or 99% identical to SEQ ID NO: 9.

[0226] In some embodiments, the coronavirus comprises a membrane (M) protein encoded by an amino acid sequence provided in SEQ ID NO: 10. In some embodiments, the M protein is encoded by an amino acid sequence that is at least about 70%, 75%, 80%, 81%, 82%, 83%, 84%, 85%, 86%, 87%, 88%, 89%, 90%, 91%, 92%, 93%, 94%, 95%, 96%, 97%, 98%, or 99% identical to SEQ ID NO: 10.

[0227] In some embodiments, the coronavirus comprises an envelope (E) protein encoded by an amino acid sequence provided in SEQ ID NO: 11. In some embodiments, the E protein is encoded by an amino acid sequence that is at least about 70%, 75%, 80%, 81%, 82%, 83%, 84%, 85%, 86%, 87%, 88%, 89%, 90%, 91%, 92%, 93%, 94%, 95%, 96%, 97%, 98%, or 99% identical to SEQ ID NO: 11.

[0228] B. Subject

[0229] In some embodiments, the subject is in need of, has been determined to be in need of, or is suspected to be in need of a treatment. As used herein, the term “subject” refers to any organism. For example, a subject can be a mammal, amphibian, fish, reptile, invertebrate, bird, plant, archaea, fungus, or bacteria. In some embodiments, the subject is a mammal. In some embodiments, the subject may be a rodent (e.g., a mouse, a rat, a hamster, a guinea pig), a canine (e.g., a dog), a feline (e.g., a cat), an equine (e.g., a horse), an ovine, a bovine, a porcine, a non-human primate, e.g., a simian (e.g., a monkey), an ape (e.g., a gorilla, a chimpanzee, an orangutan, a gibbon), or a human. In some embodiments of any of the methods described herein, the subject is between 0 and 120 years old (e.g., between birth and one month (e.g., a neonate), between one month and two years (e.g., an infant), between 2 years and 12 years (e.g., a child), between twelve years and sixteen years (e.g., an adolescent), between 1 and 120 years old, between 1 and 115 years old, between 1 and 110 years old, between 1 and 105 years old, between 1 and 100 years old, between 1 and 95 years old, between 1 and 90 years old between 1 and 85 years old, between 1 and 80 years old, between 1 and 75 years old, between 1 and 70 years old, between 1 and 65 years old, between 1 and 60 years old, between 1 and 50 years old, between 1 and 40 years old, between 1 and 30 years old, between 1 and 25 years old, between 1 and 20 years old, between 1 and 15 years old, between 1 and 10 years old, between 5 and 120 years old, between 5 and 110 years old, between 5 and 100 years old, between 5 and 90 years old, between 5 and 60 years old, between 5 and 50 years old, between 5 and 40 years old, between 5 and 30 years old, between 5 and 20 years old, between 5 and 10 years old, between 10 and 120 years old, between 10 and 110 years old, between 10 and 100 years old, between 10 and 90 years old, between 10 and 80 years old between 10 and 60 years old, between 10 and 50 years old, between 10 and 40 years old, between 10 and 30 years old, between 10 and 20 years, between 20 and 120 years old, between 20 and 110 years old, between 20 and 100 years old, between 20 and 90 years old, between 20 and 70 years old, between 20 and 60 years old, between 20 and 50 years old, between 20 and 40 years old, between 20 and 30 years old, between 30 and 120 years old, between 30 and 110 years old, between 30 and 100 years old, between 30 and 90 years old, between 30 and 70 years old, between 30 and 60 years, between 30 and 50 years old, between 40 and 120 years old, between 40 and 110 years old, between 40 and 100 years old, between 40 and 90 years old, between 40 and 80 years old, between 40 and 60 years old, between 40 and 50 years old, between 50 and 120 years old, between 50 and 110 years old, between 50 and 100 years old, between 50 and 90 years old, between 50 and 80 years old, between 50 and 70 years old, between 50 and 60 years old, between 60 and 120 years old, between 60 and 110 years old, between 60 and 100 years old, between 60 and 90 years old, between 60 and 80 years old, between 60 and 70 years old, between 70 and 120 years old, between 70 and 110 years old, between 70 and 100 years old, between 70 and 90 years old, between 70 and 80 years old, between 80 and 120 years old, between 80 and 110 years old, between 80 and 100 years old, between 80 and 90 years old, between 90 and 120 years old, between 90 and 110 years old, between 90 and 100 years old, between 100 and 120 years old, or between 110 and 120 years old). In some embodiments of any of the methods described herein, the subject is not yet born, e.g., in utero. In some embodiments of any of the methods described herein, the subject is at least 1 month old (e.g., at least 2 years old, at least 12 years old, at least 16 years old, or at least 18 years old). Any of the methods described herein can be used to treat a subject, e.g., a diseased subject (i.e., a subject with a disease, e.g., who has been diagnosed with a disease), or an asymptomatic subject (i.e., a subject who clinically presents as healthy, or who has not been diagnosed with a disease). As used herein, treating includes “prophylactic treatment” which means reducing the incidence of or preventing (or reducing risk of) a sign or symptom of a disease in a subject at risk for the disease, and “therapeutic treatment”, which means reducing signs or symptoms of a disease, reducing progression of a disease, reducing severity of a disease, re-occurrence in a subject diagnosed with the disease. As used herein, the term “treat” means to ameliorate at least one clinical parameter of the disease, and/or to provide benefits (e.g., anti-aging, anti-scarring, wound healing, anti-depressant, anti-inflammatory, weight loss).

[0230] C. Dosing Frequency and Administration

[0231] In some embodiments of any of the methods provided herein, the composition is administered at least once (e.g., 2, 3, 4, 5, 6,7, 8, 9, 10, 11, 12, 13, 14, 15, 16, 17, 18, 19, 20, 30, 40, 50, 60, 70, 80, 90, 100 times) during a period of time (e.g., every day, every 2 days, twice a week, once a week, every week, three times per month, two times per month, one time per month, every 2 months, every 3 months, every 4 months, every 5 months, every 6 months, every 7 months, every 8 months, every 9 months, every 10 months, every 11 months, once a year). Also contemplated are monthly treatments, e.g., administering at least once per month for at least 1 month (e.g., at least two, at least three, at least four, at least five, at least six or more months, e.g., 12 or more months), and yearly treatments (e.g., administration once a year for one or more years). The frequency of the administration may be relative to a particular event, such as for example, a first symptom of a pathogen-associated disease or disorder, a first dose of a vaccine composition, travel to a another state, county, country, or continent, and so forth.

[0232] Administration can be via any suitable route, e.g., subcutaneous, intravenous, arterial, ocular, oral, intramuscular, intranasal (e.g., inhalation), intraperitoneal, topical, mucosal, epidural, sublingual, epicutaneous, extra-amniotic, inter-articular, intradermal, intraosseous, intrathecal, intrauterine, intravaginal, intravesical, intravitreal, perivascular, and/or rectal administration, or any combination of known administration methods.

[0233] In some embodiments, the death process of cytoplasts can have a therapeutic effect on a subject. For example, in some embodiments, the death process of cytoplasts can be immunostimulatory. Accordingly, provided herein are methods of administering cytoplasts to a subject, wherein the death of the cytoplasts has a therapeutic effect on the subject. In some embodiments, the cytoplasts administered to the subject are dead. In some embodiments, the cytoplasts administered to the subject, when administered, have a remaining life span of less than 5 days (e.g., less than 4 days, less than 3 days, less than 2 days, less than 36 hours, less than 1 day, less than 18 hours, less than 12 hours, less than 6 hours, less than 2 hours, or less than 1 hour).

[0234] In some embodiments, cells can be removed from a subject and enucleated. In some embodiments, the cells are engineered (e.g., to produce or contain a therapeutic DNA molecule, a therapeutic RNA molecule, a therapeutic protein, a therapeutic peptide, a small molecule therapeutic, a therapeutic gene-editing factor a therapeutic nanoparticle and/or another therapeutic agent) before being enucleated. In some embodiments, cells from a subject are enucleated, and then engineered (e.g., to produce or contain a therapeutic DNA molecule, a therapeutic RNA molecule, a therapeutic protein, a therapeutic peptide, a small molecule therapeutic, a therapeutic gene-editing factor a therapeutic nanoparticle and/or another therapeutic agent). In some embodiments, the cytoplasts (whether or not they have been engineered) are administered to the subject from which the cells were removed.

[0235] In some embodiments, the media in which the cytoplasts were cultured and/or stored (a “conditioned media”) can have a therapeutic benefit. In some embodiments, the media in which cytoplasts were co-cultured and/or stored (e.g., after enucleation) with cells (a “conditioned media”) can have a therapeutic benefit. In some embodiments, the media in which cytoplasts fused with cells were cultured and/or stored with cells (a “conditioned media”) can have a therapeutic benefit.

[0236] Accordingly, provided herein are methods of treating, preventing, or prophylactically treating, or promoting health in a subject comprising administering to the subject conditioned media. Without being bound by any particular theory, it is believed that, in some embodiments, the therapeutic benefit of cultured media can be due to the presence in the media of exosomes (e.g., containing therapeutic protein) secreted by the cytoplasts.

[0237] In some embodiments of any of the methods provided herein, the composition is administered with one or more additional therapies (e.g., any drug (e.g., antibiotics, antivirals, anti-inflammatory medications) or chemotherapy (e.g., a chemotherapeutic agent (e.g., doxorubicin, paclitaxel, cyclophosphamide), or any of the small molecule therapeutics described herein), cell-based therapy, radiation therapy, immunotherapy, a small molecule, an inhibitory nucleic acid (e.g., antisense RNA, antisense DNA, miRNA, siRNA, lncRNA), an exosome-based therapy, gene therapy or surgery). In some embodiments, the one or more additional therapies comprise combination therapy inhibiting an immune checkpoint protein such as PD-1/PDCD1/CD279, CTLA-4/CD152, TIM-3/HAVCR2, TIGIT, LAG3, VISTA/C10orf54, BTLA/CD272, A2AR, KIR, CD28, ICOS/CD278, CD40L/CD154, CD137/4-1BB, CD27, OX40/CD134/TNFRSF4, GITR, or SIRPα.

[0238] In some embodiments provided herein, the composition further includes one or more additional therapies (e.g., any drug (e.g., antibiotics, antivirals) or chemotherapy (e.g., a chemotherapeutic agent (e.g., doxorubicin, paclitaxel, cyclophosphamide)), cell-based therapy, radiation therapy, immunotherapy, a small molecule, an inhibitory nucleic acid (e.g., antisense RNA, antisense DNA, miRNA, siRNA, lncRNA) or surgery).

### III. METHODS OF MANUFACTURING

[0239] The present disclosure provides methods of manufacturing the anti-viral compositions and cytoplasts disclosed herein. In some embodiments, the disclosure provides methods for the removal of the cell nucleus (also called enucleation) from any nucleated cell derived (e.g., obtained) from either normal or cancer cell lines or any primary cell removed from the body including, but not limited to, commonly used therapeutic cells derived (e.g., obtained) from the immune system (e.g., natural killer (NK) cells, neutrophils, macrophages, lymphocytes, mast cells, basophils, eosinophils), stem cells (including, for example, iPSC (induced pluripotent stem cells), adult stem cells (e.g., mesenchymal stem cells), and embryonic stem cells), and fibroblasts. Cell enucleation can create a therapeutic cytoplast which is viable for a limited period of time, for example, up to 5 days. Therefore, the present disclosure, in some aspects, provides a new use for cytoplasts as a safe therapeutic vehicle that cannot perform one or more of the following actions: proliferate, differentiate, permanently engraft into the subject, become cancerous, or transfer nuclear-encoded DNA/genes to the subject (e.g., transfer of dangerous nuclear-encoded DNA/genes to the subject).

[0240] For cell-based therapies, FDA approval has, in some cases, rested on the evidence that cells are stable, meaning that they do not change or become dangerous once inside a subject. However, current cell products, including primary cells, irradiated cells, or “death-switch” controlled cells, still have the potential to respond to or change in the in vivo microenvironment. Importantly, current therapies can still retain the potential to transcribe new genes, which is not a controllable response in vivo. This gene transcription hampers the ability to satisfy regulatory requirements. In contrast, cytoplasts, which lack a nucleus, generally do not have the potential for new gene transcription even in very different in vivo microenvironments, and therefore are a more controlled and safer cell-based therapy.

[0241] To date, cell-based therapeutics generally use normal or engineered nucleated cells. Some cell-based therapies irradiate cells prior to subject administration in order to prevent cell proliferation and induced lethal DNA-damage. However, this approach induces mutations and produces significant amounts of reactive oxygen species that can irreversibly damage cellular proteins and DNA, which can release large amounts of damaged/mutated DNA into the body of a subject. Such products can be dangerous if they integrate into other cells and/or induce an unwanted anti-DNA immune response. Irradiated cells can also be dangerous because they can transfer their mutated DNA and genes to host cells by cell-cell fusion. Removing the entire nucleus from a cell is a less damaging and significantly safer method for limiting cellular lifespan that can preclude any introduction of nuclear DNA into a subject. Furthermore, many stem cells, such as mesenchymal stem cells (MSCs), are highly resistant to radiation-induced death, and therefore cannot be rendered safe using this method. In other cases, therapeutic cells have been engineered with a drug-inducible suicide switch to limit cellular lifespan. However, activation of the switch in vivo can require administering a subject with potent and potentially harmful drugs with unwanted side effects. While this method can induce suicide in culture cells (e.g., greater than 95%), it is expected to be inefficient when translated into the clinic. Without being bound by any particular theory, it is believed that a drug-inducible suicide switch could be an insufficient safety measure for clinical practice, since not all cells in the subject may undergo drug-induced death. Therefore, in the case of extensively engineered cells or stem cells or cancer cells, a drug-induced suicide switch could be considered dangerous or insufficient for clinical practice. Moreover, the death of a therapeutic cell can release large amounts of DNA (normal or genetically altered), which can integrate into host cells or induce a dangerous systemic anti-DNA immune response. If the cell mutates and/or loses or inactivates the suicide switch, it can become an uncontrollable mutant cell. In addition, these cells can fuse with host cells in the subject, and therefore transfer DNA (e.g., mutant DNA). Such fused cells can be dangerous because not all host cells inherit the suicide gene, but can inherit some of the therapeutic cell's genes/DNA during chromosomal reorganization and cell hybridization. In addition, for the same reason, therapeutic cells with suicide switches may not be ideal for use as cell fusion partners in vitro. Another method to limit therapeutic cell lifespan is heat-induced death that causes severe damage that terminates biological functions beneficial in therapeutic use (e.g., protein translation). Unlike cytoplasts, nucleated cell therapies and even some cells inactivated by the methods described above can still transfer DNA to the subject since they retain their nucleus and genetic material. Numerous chemicals inhibit cell proliferation and/or cause cell death prior to therapeutic use, including chemotherapeutic drugs and mitomycin C, etc. However, such drugs can have significant off-target effects that significantly damage the cell, which are unwanted for clinical applications due to high toxicities. Many anti-proliferative and death-inducing drugs do not effectively inhibit 100% of the cells due to resistance, and unlike cytoplasts, many drug effects are reversible. Thus, this approach is not suitable to prevent cell growth of immortalized or cancer cells in vivo.

[0242] Provided herein are methods of manufacturing a cytoplast of the present disclosure. In some embodiments, the nucleate cell (e.g., referred to herein as a “parent cell”) is treated with cytochalasin B to soften the cortical actin cytoskeleton. In some embodiments, methods comprise introducing an active agent such as viral peptide or protein, to a nucleated cell; and mechanically removing the nucleus from the parent cell to produce a cytoplast (enucleation). In some embodiments, the parent cell is also introduced to a second active agent prior to enucleation. In some embodiments the parent cell is introduced to the second active agent after enucleation. The second active agent may be a therapeutic agent that is delivered by the cytoplast to the target cell. An exemplary target cell is a muscle cell, such as a myoblast or a mature muscle cell.

[0243] The active agent is introduced to the parent cell using a suitable transient transfection methods (e.g., electroporation) or transduction (e.g., viral-mediated). In some embodiments, a plasmid comprising a transgene encoding the active agent is transfected into the parent cell. In some embodiments, a viral vector comprising a transgene encoding the active agent is transduced into the parent cell. The plasmid can be a bacterial plasmid (e.g., E.coli). In some embodiments, the parent cell is also introduced to a second active agent by a similar method. In some embodiments, the second active agent is a therapeutic agent.

[0244] The nucleus of the parent cell expressing the active agent, and optionally, the second active agent, is removed using mechanical enucleation. In some embodiments, the parent cell wall is permeabilized using a cell-permeable mycotoxin. Mechanical enucleation may include performing a density gradient centrifugation using discontinuous Ficoll gradients, high-speed centrifugation, to form a cytoplast. The cytoplast is isolated and purified using standard purification protocols. The cytoplast may be further engineered with an exogenous nucleic acid (e.g., mRNA, DNA, antisense oligonucleotide).

[0245] The present disclosure provides methods for manufacturing cytoplasts with either natural or inducible expression and/or uptake of biomolecules with therapeutic functions including, but not limited to, DNA/genes (e.g., plasmids) RNA (e.g., mRNA, shRNA, siRNA, miRNA), proteins, peptides, small molecule therapeutics (e.g., small molecule drugs), gene editing components, nanoparticles, and other therapeutic agents (e.g., bacteria, bacterial spores, bacteriophages, bacterial components, viruses (e.g., oncolytic viruses), exosomes, lipids, or ions).

[0246] Various methods are known in the art that can be used to introduce a biomolecule (e.g., a RNA molecule (e.g., mRNA, miRNA, siRNA, shRNA, lncRNA), a DNA molecule (e.g., a plasmid), a protein, a gene-editing factor (e.g., a CRISPR/Cas9 gene-editing factor), a peptide, a plasmid) into a cytoplast (e.g., a cytoplast derived from any cell described herein). Non-limiting examples of methods that can be used to introduce a biomolecule into a cytoplast include: electroporation, microinjection, lipofection, transfection, calcium phosphate transfection, dendrimer-based transfection, cationic polymer transfection, cell squeezing, sonoporation, optical transfection, impalection, hydrodynamic delivery, magnetofection, and nanoparticle transfection. Non-limiting examples of gene-editing factors include: CRISPR/Cas9 gene-editing, transcription activator-like effector nuclease (TALEN), and zinc finger nucleases.

[0247] Methods of culturing a cell (e.g., any of the cells described herein) are well known in the art. Cells can be maintained in vitro under conditions that favor growth, proliferation, viability, differentiation and/or induction of specific biological functions with therapeutic capabilities/benefits including, but not limited to, 3-dimensional culturing, hypoxic environments, culturing on defined extracellular matrix components, treatment with chemical agents, cytokines, growth factors or exposure to any exogenous agent natural or synthetic that induces a specific desirable cell response.

[0248] Methods encompass the largescale in vitro production of cytoplasts derived (e.g., obtained) from any nucleated cell type (e.g., a mammalian cell, a human cell), a protozoal cell (e.g., an amoeba cell), an algal cell, a plant cell, a fungal cell, an invertebrate cell, a fish cell, an amphibian cell, a reptile cell, or a bird cell). For example, the cell can have been immortalized and/or oncogenically transformed naturally or by genetic engineering.

[0249] Provided herein methods of storing the purified and isolated cytoplasts of the present disclosure such that the biological activity of the cytoplast is slowed or stopped completely. In some embodiments, the cytoplast is stored in a suspension animation at a temperature that is at most 10° C. In some embodiments, the temperature is about 4° C. In some embodiments, the temperature is 4° C. In some embodiments, the temperature is at most 4° C. In some embodiments, the cytoplast is stored for at most or about 96 hours. After a period of time, the cytoplast is removed from the suspension animation to revive the biological activity of the cytoplast. The resulting cytoplast is viable, and suitable for delivery to a subject in need thereof. In some embodiments, the cytoplasts stored at between 4° C. to 10° C. exhibit at least or equal to 10%, 20%, 30%, 40%, 50%, 60%, 70%, 75%, 80%, 85%, 90%, 95%, or 99% viability as compared with a cytoplast prior to being stored at between 4° C. to 10° C.

[0250] In some embodiments of any of the compositions and methods provided herein, the cytoplast is cooled or frozen for later use. Various methods of preserving cells are known in the art, including, but not limited to, the use of a serum (e.g., Fetal Bovine Serum) and dimethyl sulfoxide (DMSO) at ultralow temperatures (frozen cryopreservation) or hibernation media for storage at 4° C. (cryohibernation). In some embodiments of any of the compositions and methods provided herein, the cytoplast is thawed prior to use.

[0251] In some embodiments, the cytoplasts can be stored at a temperature between about −80° C. and about 16° C. (e.g., about −80° C. and about 12° C., −80° C. and about 10° C., about −80° C. and about 8° C., about −80° C. and about 6° C., about −80° C. and about 4° C., about −80° C. and about 2° C., about −80° C. and about 0° C., about −80° C. and about −4° C., about −80° C. and about −10° C., about −80° C. and about −16° C., about −80° C. and about −20° C., about −80° C. and about −25° C., about −80° C. and about −30° C., about −80° C. and about −35° C., about −80° C. and about −40° C., about −80° C. and about −45° C., about −80° C. and about −50° C., about −80° C. and about −55° C., about −80° C. and about −60° C., about −80° C. and about −65° C., about −80° C. and about −70° C., about −60° C. and about 16° C., about −60° C. and about 12° C., about −60° C. and about 10° C., about −60° C. and about 8° C., about −60° C. and about 6° C., about −60° C. and about 4° C., about −60° C. and about 2° C., about −60° C. and about 0° C., about −60° C. and about −4° C., about −60° C. and about −10° C., about −60° C. and about −10° C., about −60° C. and about −16° C., about −60° C. and about −20° C., about −60° C. and about −25° C., about −60° C. and about −30° C., about −60° C. and about −35° C., about −60° C. and about −40° C., about −60° C. and about −50° C., about −50° C. and about 16° C., about −50° C. and about 12° C., about −50° C. and about 10° C., about −50° C. and about 8° C., about −50° C. and about 6° C., about −50° C. and about 4° C., about −50° C. and about 2° C., about −50° C. and about 0° C., about −50° C. and about −4° C., about −50° C. and about −10° C., about −50° C. and about −16° C., about −50° C. and about −20° C., about −50° C. and about −30° C., about −50° C. and about −40° C., about −20° C. and about 16° C., about −20° C. and about 12° C., about −20° C. and about 10° C., about −20° C. and about 8° C., about −20° C. and about 6° C., about −20° C. and about 4° C., about −20° C. and about 2° C., -about 20° C. and about 0° C., about −20° C. and about −4° C., about −20° C. and about −10° C., about −20° C. and about −15° C., about −10° C. and about 16° C., about −10° C. and about 12° C., about −10° C. and about 10° C., about −10° C. and about 8° C., about −10° C. and about 6° C., about −10° C. and about 4° C., about −10° C. and about 2° C., about −10° C. and about 0° C., about −10° C. and about −4° C., about −10° C. and about −6° C., about −4° C. and about 16° C., about −4° C. and about 10° C., about −4° C. and about 6° C., about −4° C. and about 4° C., about −4° C. and about 2° C., about −4° C. and about 0° C., about −2° C. and about 16° C., about −2° C. and about 12° C., about −2° C. and about 10° C., about −2° C. and about 6° C., about −2° C. and about 4° C., about −2° C. and about 2° C., about −2° C. and about 0° C., about 0° C. and about 16° C., about 0° C. and about 14° C., about 0° C. and about 12° C., about 0° C. and about 10° C., about 0° C. and about 8° C., about 0° C. and about 6° C., about 0° C. and about 4° C., about 2° C. and about 16° C., about 2° C. and about 12° C., about 2° C. and about 10° C., about 2° C. and about 8° C., about 2° C. and about 6° C., about 2° C. and about 4° C., about 4° C. and about 16° C., about 4° C. and about 12° C., about 4° C. and about 10° C., about 4° C. and about 8° C., about 4° C. and about 6° C., about 6° C. and about 16° C., about 6° C. and about 12° C., about 6° C. and about 10° C., about 6° C. and about 8° C., about 8° C. and about 16° C., about 8° C. and about 12° C., about 8° C. and about 10° C., about 10° C. and about 16° C., about 10° C. and about 12° C., or about 12° C. and about 16° C.) for about 1 day to about 7 days (e.g., about 1 day to about 6 days, about 1 day to about 5 days, about 1 day to about 4 days, about 1 day to about 3 days, about 1 day to about 2 days, about 2 days to about 7 days, about 2 days to about 6 days, about 2 days to about 5 days, about 2 days to about 4 days, about 2 days to about 3 days, about 3 days to about 7 days, about 3 days to about 6 days, about 3 days to about 5 days, about 3 days to about 4 days, about 4 days to about 7 days, about 4 days to about 6 days, about 4 days to about 5 days, about 5 days to about 7 days, about 5 days to about 6 days, or about 6 days to about 7 days). In some embodiments, the cytoplasts stored at the temperature ranges described herein exhibit at least or equal to 10%, 20%, 30%, 40%, 50%, 60%, 70%, 75%, 80%, 85%, 90%, 95%, or 99% viability as compared with a cytoplast prior to being stored at the same temperature ranges.

[0252] In some embodiments, the cytoplasts are lyophilized. In some embodiments, the cytoplasts are lyophilized for storage. In some embodiments, the cytoplasts are lyophilized for at least or equal to 1 hour, 2 hours, 4 hours, 6 hours, 8 hours, 12 hours, 24 hours, 2 days, 3 days, 4 days, 5 days, 6 days, 7 days, 8 days, 9 days, 10 days, 12 days, 14 days, 16 days, 18 days, 20 days, 22 days, 24 days, 26 days, 28 days, 30 days, 2 months, 3 months, 4 months, 5 months, 6 months, 2 months, 3 months, 4 months, 5 months, 6 months, 7 months, 8 months, 9 months, 10 months, 11 months, 12 months, 18 months, 24 months, 30 months, 3 years, 4 years, 5 years, or 10 years. In some embodiments, the cytoplasts exhibit at least or equal to 10%, 20%, 30%, 40%, 50%, 60%, 70%, 75%, 80%, 85%, 90%, 95%, or 99% viability as compared with a cytoplast prior to being lyophilized.

### IV. KITS

[0253] Disclosed herein, in some embodiments, are kits for using the compositions, the pharmaceutical compositions, or the cytoplasts described herein. In some embodiments, the kits disclosed herein may be used to prevent or treat a disease or condition in a subject; or select a subject for prevention or treatment for the disease or condition disclosed herein. In some embodiments, the kit comprises the pharmaceutical compositions, the compositions, or the cytoplasts described herein, which may be used to perform the methods described herein. Kits comprise an assemblage of materials or components. Thus, in some embodiments the kit contains a composition including of the pharmaceutical composition or the cytoplast, for the treatment of the disease or disorder described herein.

[0254] In some embodiments, the kit described herein comprises components for selecting for a homogenous population of the cytoplasts. In some embodiments, the kit described herein comprises components for selecting for a heterogenous population of the cytoplasts. In some embodiments, the kit comprises the components for assaying the number of units of the exogenous therapeutic synthesized or released by the cytoplast. In some embodiments, the kit comprises the components for assaying the number of units of the exogenous therapeutic expressed on the surface of the cytoplast. In some embodiments, the kit comprises components for performing assays such as enzyme-linked immunosorbent assay (ELISA), single-molecular array (Simoa), PCR, and qPCR. The exact nature of the components configured in the kit depends on its intended purpose. For example, some embodiments are configured for the purpose of vaccinating or treating a disease or condition disclosed herein (e.g., respiratory disease) in a subject. In some embodiments, the kit is configured particularly for the purpose of vaccinating or treating mammalian subjects. In some embodiments, the kit is configured particularly for the purpose of vaccinating or treating human subjects.

[0255] Instructions for use may be included in the kit. For the example, the instruction may direct healthcare providers how to vaccinate the subject with the components of the kit in a medical facility or in a point of care capacity. Optionally, the kit also contains other useful components, such as, diluents, buffers, pharmaceutically acceptable carriers, syringes, catheters, applicators, pipetting or measuring tools, bandaging materials or other useful paraphernalia. The materials or components assembled in the kit may be provided to the practitioner stored in any convenient and suitable ways that preserve their operability and utility. For example the components may be in dissolved, dehydrated, or lyophilized form; they may be provided at room, refrigerated or frozen temperatures. The components are typically contained in suitable packaging material(s). As employed herein, the phrase “packaging material” refers to one or more physical structures used to house the contents of the kit, such as compositions and the like. The packaging material is constructed by well-known methods, preferably to provide a sterile, contaminant-free environment. The packaging materials employed in the kit are those customarily utilized in gene expression assays and in the administration of treatments. As used herein, the term “package” refers to a suitable solid matrix or material such as glass, plastic, paper, foil, and the like, capable of holding the individual kit components. Thus, for example, a package may be a glass vial or prefilled syringes used to contain suitable quantities of the pharmaceutical composition. The packaging material has an external label which indicates the contents and/or purpose of the kit and its components.

### V. DEFINITIOINS

[0256] Unless defined otherwise, all terms of art, notations and other technical and scientific terms or terminology used herein are intended to have the same meaning as is commonly understood by one of ordinary skill in the art to which the claimed subject matter pertains. In some embodiments, terms with commonly understood meanings are defined herein for clarity and/or for ready reference, and the inclusion of such definitions herein should not necessarily be construed to represent a substantial difference over what is generally understood in the art.

[0257] Throughout this application, various embodiments may be presented in a range format. It should be understood that the description in range format is merely for convenience and brevity and should not be construed as an inflexible limitation on the scope of the disclosure. Accordingly, the description of a range should be considered to have specifically disclosed all the possible subranges as well as individual numerical values within that range. For example, description of a range such as from 1 to 6 should be considered to have specifically disclosed subranges such as from 1 to 3, from 1 to 4, from 1 to 5, from 2 to 4, from 2 to 6, from 3 to 6 etc., as well as individual numbers within that range, for example, 1, 2, 3, 4, 5, and 6. This applies regardless of the breadth of the range.

[0258] As used in the specification and claims, the singular forms “a”, “an” and “the” include plural references unless the context clearly dictates otherwise. For example, the term “a sample” includes a plurality of samples, including mixtures thereof.

[0259] Use of absolute or sequential terms, for example, “will,” “will not,” “shall,” “shall not,” “must,” “must not,” “first,” “initially,” “next,” “subsequently,” “before,” “after,” “lastly,” and “finally,” are not meant to limit scope of the present embodiments disclosed herein but as exemplary.

[0260] As used herein, the phrases “at least one”, “one or more”, and “and/or” are open-ended expressions that are both conjunctive and disjunctive in operation. For example, each of the expressions “at least one of A, B and C”, “at least one of A, B, or C”, “one or more of A, B, and C”, “one or more of A, B, or C” and “A, B, and/or C” means A alone, B alone, C alone, A and B together, A and C together, B and C together, or A, B and C together.

[0261] Whenever the term “at least,” “greater than,” or “greater than or equal to” precedes the first numerical value in a series of two or more numerical values, the term “at least,” “greater than” or “greater than or equal to” applies to each of the numerical values in that series of numerical values. For example, greater than or equal to 1, 2, or 3 is equivalent to greater than or equal to 1, greater than or equal to 2, or greater than or equal to 3.

[0262] Whenever the term “no more than,” “less than,” or “less than or equal to” precedes the first numerical value in a series of two or more numerical values, the term “no more than,” “less than,” or “less than or equal to” applies to each of the numerical values in that series of numerical values. For example, less than or equal to 3, 2, or 1 is equivalent to less than or equal to 3, less than or equal to 2, or less than or equal to 1.

[0263] Any systems, methods, software, compositions, and platforms described herein are modular and not limited to sequential steps. Accordingly, terms such as “first” and “second” do not necessarily imply priority, order of importance, or order of acts.

[0264] The terms “increased,” or “increase” are used herein to generally mean an increase by a statically significant amount. In some embodiments, the terms “increased,” or “increase,” mean an increase of at least 10% as compared to a reference level, for example an increase of at least about 10%, at least about 20%, or at least about 30%, or at least about 40%, or at least about 50%, or at least about 60%, or at least about 70%, or at least about 80%, or at least about 90% or up to and including a 100% increase or any increase between 10-100% as compared to a reference level, standard, or control. Other examples of “increase” include an increase of at least 2-fold, at least 5-fold, at least 10-fold, at least 20-fold, at least 50-fold, at least 100-fold, at least 1000-fold or more as compared to a reference level.

[0265] The terms, “decreased” or “decrease” are used herein generally to mean a decrease by a statistically significant amount. In some embodiments, “decreased” or “decrease” means a reduction by at least 10% as compared to a reference level, for example a decrease by at least about 20%, or at least about 30%, or at least about 40%, or at least about 50%, or at least about 60%, or at least about 70%, or at least about 80%, or at least about 90% or up to and including a 100% decrease (e.g., absent level or non-detectable level as compared to a reference level), or any decrease between 10-100% as compared to a reference level. In the context of a marker or symptom, by these terms is meant a statistically significant decrease in such level. The decrease can be, for example, at least 10%, at least 20%, at least 30%, at least 40% or more, and is preferably down to a level accepted as within the range of normal for an individual without a given disease. Other examples of “decrease” include a decrease of at least 2-fold, at least 5-fold, at least 10-fold, at least 20-fold, at least 50-fold, at least 100-fold, at least 1000-fold or more as compared to a reference level.

[0266] As used herein, a “cell” generally refers to a biological unit of a living organism.

[0267] As used herein, the term “eukaryotic cell” refers to a cell having a distinct, membrane-bound nucleus. Such cells may include, for example, mammalian (e.g., rodent, non-human primate, or human), non-mammalian animal (e.g., fish, bird, reptile, or amphibian), invertebrate, insect, fungal, or plant cells. In some embodiments, the eukaryotic cell is a yeast cell, such as Saccharomyces cerevisiae. In some embodiments, the eukaryotic cell is a higher eukaryote, such as mammalian, avian, plant, or insect cells.

[0268] As used herein, the term “cytoplast,” “cell without a nucleus,” or “enucleated cell” are used interchangeably to refer to a nucleus-free cell that was obtained from a previously nucleated cell (e.g., any cell described herein). In some embodiments, the nucleated cell comprises cell organelles and the cytoplast derived from the nucleated cell retains such organelles, which in some cases, enables cellular functions such as cell motility, protein synthesis, protein secretion, and the like. In some embodiments “obtaining” does not involve differentiating the nucleated cell into an enucleated cell using natural processes or otherwise.

[0269] The term “nucleotide,” as used herein, generally refers to a base-sugar-phosphate combination. A nucleotide can comprise a synthetic nucleotide. A nucleotide can comprise a synthetic nucleotide analog. Nucleotides can be monomeric units of a nucleic acid sequence (e.g. deoxyribonucleic acid (DNA) and ribonucleic acid (RNA)). The term nucleotide can include ribonucleoside triphosphates adenosine triphosphate (ATP), uridine triphosphate (UTP), cytosine triphosphate (CTP), guanosine triphosphate (GTP) and deoxyribonucleoside triphosphates such as dATP, dCTP, dITP, dUTP, dGTP, dTTP, or derivatives thereof. Such derivatives can include, for example, [αS]dATP, 7-deaza-dGTP and 7-deaza-dATP, and nucleotide derivatives that confer nuclease resistance on the nucleic acid molecule containing them. The term nucleotide as used herein can refer to dideoxyribonucleoside triphosphates (ddNTPs) and their derivatives. Illustrative examples of dideoxyribonucleoside triphosphates can include, but are not limited to, ddATP, ddCTP, ddGTP, ddITP, and ddTTP. A nucleotide can be unlabeled or detectably labeled by well-known techniques. Labeling can also be carried out with quantum dots. Detectable labels can include, for example, radioactive isotopes, fluorescent labels, chemiluminescent labels, bioluminescent labels and enzyme labels. Fluorescent labels of nucleotides can include but are not limited fluorescein, 5-carboxyfluorescein (FAM), 2′7′-dimethoxy-4′5-dichloro carboxyfluorescein (JOE), rhodamine, 6-carboxyrhodamine (R6G), N,N,N′,N′-tetramethyl-6-carboxyrhodamine (TAMRA), 6-carboxy-X-rhodamine (ROX), 4-(4′dimethylaminophenylazo) benzoic acid (DABCYL), Cascade Blue, Oregon Green, Texas Red, Cyanine and 5-(2′-aminoethyl)aminonaphthalene-1-sulfonic acid (EDANS). Specific examples of fluorescently labeled nucleotides can include [R6G]dUTP, [TAMRA]dUTP, [R110]dCTP, [R6G]dCTP, [TAMRA]dCTP, [JOE]ddATP, [R6G]ddATP, [FAM]ddCTP, [R110]ddCTP, [TAMRA]ddGTP, [ROX]ddTTP, [dR6G]ddATP, [dR110]ddCTP, [dTAMRA]ddGTP, and [dROX]ddTTP available from Perkin Elmer, Foster City, Calif.; FluoroLink DeoxyNucleotides, FluoroLink Cy3-dCTP, FluoroLink Cy5-dCTP, FluoroLink Fluor X-dCTP, FluoroLink Cy3-dUTP, and FluoroLink Cy5-dUTP available from Amersham, Arlington Heights, Ill.; Fluorescein-15-dATP, Fluorescein-12-dUTP, Tetramethyl-rodamine-6-dUTP, IR770-9-dATP, Fluorescein-12-ddUTP, Fluorescein-12-UTP, and Fluorescein-15-2′-dATP available from Boehringer Mannheim, Indianapolis, Ind.; and Chromosome Labeled Nucleotides, BODIPY-FL-14-UTP, BODIPY-FL-4-UTP, BODIPY-TMR-14-UTP, BODIPY-TMR-14-dUTP, BODIPY-TR-14-UTP, BODIPY-TR-14-dUTP, Cascade Blue-7-UTP, Cascade Blue-7-dUTP, fluorescein-12-UTP, fluorescein-12-dUTP, Oregon Green 488-5-dUTP, Rhodamine Green-5-UTP, Rhodamine Green-5-dUTP, tetramethylrhodamine-6-UTP, tetramethylrhodamine-6-dUTP, Texas Red-5-UTP, Texas Red-5-dUTP, and Texas Red-12-dUTP available from Molecular Probes, Eugene, Oreg. Nucleotides can also be labeled or marked by chemical modification. A chemically-modified single nucleotide can be biotin-dNTP. Some non-limiting examples of biotinylated dNTPs can include, biotin-dATP (e.g., bio-N6-ddATP, biotin-14-dATP), biotin-dCTP (e.g., biotin-11-dCTP, biotin-14-dCTP), and biotin-dUTP (e.g. biotin-11-dUTP, biotin-16-dUTP, biotin-20-dUTP).

[0270] The terms “polynucleotide,” “oligonucleotide,” and “nucleic acid” are used interchangeably to refer to a polymeric form of nucleotides of any length, either deoxyribonucleotides or ribonucleotides, or analogs thereof, either in single-, double-, or multi-stranded form. A polynucleotide can be exogenous or endogenous to a cell. A polynucleotide can exist in a cell-free environment. A polynucleotide can be a gene or fragment thereof. A polynucleotide can be DNA. A polynucleotide can be RNA. A polynucleotide can have any three dimensional structure, and can perform any function, known or unknown. A polynucleotide can comprise one or more analogs (e.g. altered backbone, sugar, or nucleobase). If present, modifications to the nucleotide structure can be imparted before or after assembly of the polymer. Some non-limiting examples of analogs include: 5-bromouracil, peptide nucleic acid, xeno nucleic acid, morpholinos, locked nucleic acids, glycol nucleic acids, threose nucleic acids, dideoxynucleotides, cordycepin, 7-deaza-GTP, fluorophores (e.g. rhodamine or fluorescein linked to the sugar), thiol containing nucleotides, biotin linked nucleotides, fluorescent base analogs, CpG islands, methyl-7-guanosine, methylated nucleotides, inosine, thiouridine, pseudourdine, dihydrouridine, queuosine, and wyosine. Non-limiting examples of polynucleotides include coding or non-coding regions of a gene or gene fragment, loci (locus) defined from linkage analysis, exons, introns, messenger RNA (mRNA), transfer RNA (tRNA), ribosomal RNA (rRNA), short interfering RNA (siRNA), short-hairpin RNA (shRNA), micro-RNA (miRNA), ribozymes, cDNA, recombinant polynucleotides, branched polynucleotides, plasmids, vectors, isolated DNA of any sequence, isolated RNA of any sequence, cell-free polynucleotides including cell-free DNA (cfDNA) and cell-free RNA (cfRNA), nucleic acid probes, and primers. The sequence of nucleotides can be interrupted by non-nucleotide components.

[0271] The terms “transfection” or “transfected” generally refers to introduction of a nucleic acid into a cell by non-viral or viral-based methods. The nucleic acid molecules can be gene sequences encoding complete proteins or functional portions thereof. See, e.g., Sambrook et al., 1989, Molecular Cloning: A Laboratory Manual, 18.1-18.88.

[0272] The term “gene,” as used herein, refers to a segment of nucleic acid that encodes an individual protein or RNA (also referred to as a “coding sequence” or “coding region”), optionally together with associated regulatory region such as promoter, operator, terminator and the like, which can be located upstream or downstream of the coding sequence. The term “gene” is to be interpreted broadly, and can encompass mRNA, cDNA, cRNA and genomic DNA forms of a gene. In some uses, the term “gene” encompasses the transcribed sequences, including 5′ and 3′ untranslated regions (5′-UTR and 3′-UTR), exons and introns. In some genes, the transcribed region will contain “open reading frames” that encode polypeptides. In some uses of the term, a “gene” comprises only the coding sequences (e.g., an “open reading frame” or “coding region”) necessary for encoding a polypeptide. In some aspects, genes do not encode a polypeptide, for example, ribosomal RNA genes (rRNA) and transfer RNA (tRNA) genes. In some aspects, the term “gene” includes not only the transcribed sequences, but in addition, also includes non-transcribed regions including upstream and downstream regulatory regions, enhancers and promoters. The term “gene” can encompass mRNA, cDNA and genomic forms of a gene.

[0273] The term “mutation,” as used herein, can refer to a substitution of a residue within a sequence, e.g., a nucleic acid or amino acid sequence, with another residue, or a deletion or insertion of one or more residues within a sequence. One or more mutations can be described by identifying the original residue followed by the position of the residue within the sequence and by the identity of the newly substituted residue. Mutation can be a change or alteration in a sequence (e.g., nucleic acid sequence, genomic sequence, genetic sequence such as DNA, RNA, or protein sequence) relative to a reference sequence. The reference sequence can be a wild-type sequence, a sequence of a healthy or normal cell, or a sequence that is not associated with a disease or a disorder. A reference sequence can be a sequence not associated with a cancer. Non-limiting examples of mutations include point mutations, substitution of one or more nucleotides, deletion of one or more nucleotides, insertion of one or more nucleotides, fusion of one or more nucleotides, frame shift mutation, aberration, alternative splicing, abnormal methylation, missense mutation, conservative mutation, non-conservative mutation, nonsense mutation, splice variant, alternative splice variant, transition, transversion, de novo mutation, deleterious mutation, disease-causing mutation, epimutation, founder mutation, germline mutation, somatic mutation, predisposing mutation, splice-site mutation, or susceptibility gene mutation. The mutation can be a pathogenic variant or mutation that increases an individual's susceptibility or predisposition to a certain disease or disorder. The mutation can be a driver mutation (e.g., a mutation that can confer a fitness advantage to cells in their microenvironment, thereby driving the cell lineage to cancer). The driver mutation can be a lost function mutation. The mutation can be a lost function mutation. The mutation can be a passenger mutation (e.g., a mutation that occurs in a genome with the driver mutation and can be associated with clonal expansion). As used herein, the term “gene” can refer to a combination of polynucleotide elements, that when operatively linked in either a native or recombinant manner, provide some product or function.

[0274] As used herein, the terms “polypeptide,” “peptide” and “protein” can be used interchangeably herein in reference to a polymer of amino acid residues. A protein can refer to a full-length polypeptide as translated from a coding open reading frame, or as processed to its mature form, while a polypeptide or peptide can refer to a degradation fragment or a processing fragment of a protein that nonetheless uniquely or identifiably maps to a particular protein. A polypeptide can be a single linear polymer chain of amino acids bonded together by peptide bonds between the carboxyl and amino groups of adjacent amino acid residues. Polypeptides can be modified, for example, by the addition of carbohydrate, phosphorylation, etc. Proteins can comprise one or more polypeptides.

[0275] As used herein, the terms “portion,” or “fragment,” or equivalent terms can refer to a portion of an entity (e.g., a protein). In the case of proteins or polypeptides, a portion or fragment is less than the full-length of the protein or polypeptide. In some embodiments, the portion or fragment maintains an intended function of the full-length protein.

[0276] The terms “complement,” “complements,” “complementary,” and “complementarity,” as used herein, generally refer to a sequence that is fully complementary to and hybridizable to the given sequence. In some embodiments, a sequence hybridized with a given nucleic acid is referred to as the “complement” or “reverse-complement” of the given molecule if its sequence of bases over a given region is capable of complementarily binding those of its binding partner, such that, for example, A-T, A-U, G-C, and G-U base pairs are formed. In general, a first sequence that is hybridizable to a second sequence is specifically or selectively hybridizable to the second sequence, such that hybridization to the second sequence or set of second sequences is preferred (e.g. thermodynamically more stable under a given set of conditions, such as stringent conditions commonly used in the art) to hybridization with non-target sequences during a hybridization reaction. Typically, hybridizable sequences share a degree of sequence complementarity over all or a portion of their respective lengths, such as between 25%-100% complementarity, including at least 25%, 30%, 35%, 40%, 45%, 50%, 55%, 60%, 65%, 70%, 75%, 80%, 85%, 90%, 91%, 92%, 93%, 94%, 95%, 96%, 97%, 98%, 99%, and 100% sequence complementarity. Sequence identity, such as for the purpose of assessing percent complementarity, can be measured by any suitable alignment algorithm, including but not limited to the Needleman-Wunsch algorithm (see e.g. the EMBOSS Needle aligner available at www.ebi.ac.uk/Tools/psa/emboss_needle/nucleotide.html, optionally with default settings), the BLAST algorithm (see e.g. the BLAST alignment tool available at blast.ncbi.nlm.nih.gov/Blast.cgi, optionally with default settings), or the Smith-Waterman algorithm (see e.g. the EMBOSS Water aligner available at www.ebi.ac.uk/Tools/psa/emboss_water/nucleotide.html, optionally with default settings). Optimal alignment can be assessed using any suitable parameters of a chosen algorithm, including default parameters.

[0277] The term “percent (%) identity,” as used herein, generally refers to the percentage of amino acid (or nucleic acid) residues of a candidate sequence that are identical to the amino acid (or nucleic acid) residues of a reference sequence after aligning the sequences and introducing gaps, if necessary, to achieve the maximum percent identity (i.e., gaps can be introduced in one or both of the candidate and reference sequences for optimal alignment and non-homologous sequences can be disregarded for comparison purposes). Alignment, for purposes of determining percent identity, can be achieved in various ways that are within the skill in the art, for instance, using publicly available computer software such as BLAST, ALIGN, or Megalign (DNASTAR) software. Percent identity of two sequences can be calculated by aligning a test sequence with a comparison sequence using BLAST, determining the number of amino acids or nucleotides in the aligned test sequence that are identical to amino acids or nucleotides in the same position of the comparison sequence, and dividing the number of identical amino acids or nucleotides by the number of amino acids or nucleotides in the comparison sequence.

[0278] The terms “determining,” “measuring,” “evaluating,” “assessing,” “assaying,” and “analyzing” are often used interchangeably herein to refer to forms of measurement. The terms include determining if an element is present or not (for example, detection). These terms can include quantitative, qualitative or quantitative and qualitative determinations. Assessing can be relative or absolute. “Detecting the presence of” can include determining the amount of something present in addition to determining whether it is present or absent depending on the context.

[0279] The terms “subject” and “individual,” are often used interchangeably herein, to refer to a biological entity containing expressed genetic materials. As used herein, the term “subject” refers to any organism. For example, a subject can be a mammal, amphibian, fish, reptile, invertebrate, bird, plant, archaea, fungus, or bacteria. In some embodiments, the subject is a mammal. In some embodiments, the subject may be a rodent (e.g., a mouse, a rat, a hamster, a guinea pig), a canine (e.g., a dog), a feline (e.g., a cat), an equine (e.g., a horse), an ovine, a bovine, a porcine, a non-human primate, e.g., a simian (e.g., a monkey), an ape (e.g., a gorilla, a chimpanzee, an orangutan, a gibbon), or a human. The subject can be tissues, cells and their progeny of a biological entity obtained in vivo or cultured in vitro. The subject can be a mammal. The mammal can be a human. The subject may be a “patient,” which in some embodiments, refers to a subject that has been diagnosed or has a disease or condition described herein. In some embodiments, the subject has not been diagnosed, but is predicted to beat high risk for developing or having the disease or the condition.

[0280] The term “in vivo” is used to describe an event that takes place in a subject's body.

[0281] The term “ex vivo” is used to describe an event that takes place outside of a subject's body. An ex vivo assay is not performed on a subject. Rather, it is performed upon a sample separate from a subject. An example of an ex vivo assay performed on a sample is an “in vitro” assay.

[0282] The term “in vitro” is used to describe an event that takes places contained in a container for holding laboratory reagent such that it is separated from the biological source from which the material is obtained. In vitro assays can encompass cell-based assays in which living or dead cells are employed. In vitro assays can also encompass a cell-free assay in which no intact cells are employed.

[0283] As used herein, the term “about” a number refers to that number plus or minus 10% of that number. The term “about” a range refers to that range minus 10% of its lowest value and plus 10% of its greatest value.

[0284] As used herein, the terms “treatment” or “treating” are used in reference to a pharmaceutical or other intervention regimen for obtaining beneficial or desired results in the recipient. Beneficial or desired results include but are not limited to a therapeutic benefit and/or a prophylactic benefit. A therapeutic benefit may refer to eradication or amelioration of symptoms or of an underlying disorder being treated. Also, a therapeutic benefit can be achieved with the eradication or amelioration of one or more of the physiological symptoms associated with the underlying disorder such that an improvement is observed in the subject, notwithstanding that the subject may still be afflicted with the underlying disorder. A prophylactic effect includes delaying, preventing, or eliminating the appearance of a disease or condition, delaying or eliminating the onset of symptoms of a disease or condition, slowing, halting, or reversing the progression of a disease or condition, or any combination thereof. For prophylactic benefit, a subject at risk of developing a particular disease, or to a subject reporting one or more of the physiological symptoms of a disease may undergo treatment, even though a diagnosis of this disease may not have been made.

[0285] The term “adaptive immune response” as used herein refers to the components of the immune response that respond in an antigen-restricted way and encompasses cellular immune responses attributable to T lymphocytes and humoral or antibody response attributable to B cells and plasma cells. A “cellular immune response” is indicated by any one or more of the following: cytokine/chemokine release by T cells; T-cell homing to secondary lymphoid organs; T-cell proliferation; and cytotoxic T-cell responses. Several methods can be used to verify an antigen-specific cellular immune response, including ex vivo antigen stimulation assays of T lymphocytes and in vivo assays, such as tetramer staining of T lymphocytes. An “antibody response” is indicated by any one or more of the following: B cell proliferation, B-cell cytokine/chemokine release, B-cell homing to secondary lymphoid organs, antibody secretion, isotype switching to IgG type antibodies, or plasma cell differentiation. An antibody response can be verified by several methods, but a predominant method is the detection of antigen-specific antibodies in the serum or plasma of a vaccinated individual.

[0286] An “adjuvant” as described herein refers to a substance that in combination with an antigen promotes an adaptive immune response to the antigen. An “immune stimulatory compound” refers to a substance that specifically interacts with the innate immune system to initiate a “danger signal” that ultimately leads to the development of the adaptive components of the immune response (e.g., B cell, T cells). Immune stimulatory compounds include pathogen-associated molecular patterns (PAMPs) such as dsRNA, lipopolysaccharide, and CpG DNA, either naturally occurring or synthetic. Immune stimulatory compounds are agonists of various innate immune receptors including Toll-like receptors (TLRs), NOD-like receptors, RIG-1 or MDA-5 receptors, C-type lectin receptors, or the STING pathway.

[0287] The term “pharmaceutically acceptable carrier,” “pharmaceutically acceptable excipient,” “physiologically acceptable carrier,” or “physiologically acceptable excipient” refers to a pharmaceutically-acceptable material, composition, or vehicle, such as a liquid or solid filler, diluent, excipient, solvent, or encapsulating material. A component can be “pharmaceutically acceptable” in the sense of being compatible with the other ingredients of a pharmaceutical formulation. It can also be suitable for use in contact with the tissue or organ of humans and animals without excessive toxicity, irritation, allergic response, immunogenicity, or other problems or complications, commensurate with a reasonable benefit/risk ratio. See, Remington: The Science and Practice of Pharmacy, 21st Edition; Lippincott Williams & Wilkins: Philadelphia, Pa., 2005; Handbook of Pharmaceutical Excipients, 5th Edition”; Rowe et al., Eds., The Pharmaceutical Press and the American Pharmaceutical Association: 2005; and Handbook of Pharmaceutical Additives, 3rd Edition; Ash and Ash Eds., Gower Publishing Company: 2007; Pharmaceutical Preformulation and Formulation, Gibson Ed., CRC Press LLC: Boca Raton, Fla., 2004).

[0288] The term “pharmaceutical composition” refers to a mixture of a compound disclosed herein with other chemical components, such as diluents or carriers. The pharmaceutical composition can facilitate administration of the compound to an organism. Multiple techniques of administering a compound exist in the art including, but not limited to, oral, injection, aerosol, parenteral, and topical administration. The section headings used herein are for organizational purposes only and are not to be construed as limiting the subject matter described.

### VI. EMBODIMENTS

### Compositions

[0289] Disclosed herein are compositions in accordance with the embodiments below:

[0290] Embodiment 1. A composition comprising a cell that is enucleated and comprises an anti-viral agent.

[0291] Embodiment 2. The composition of embodiment 1, wherein the anti-viral agent is an attenuated version of a viral antigen, a virus, or an antibody specific to the viral antigen.

[0292] Embodiment 3. The composition of embodiment 2, wherein the viral antigen is a viral protein, peptide fragment, nucleic acid, or sugar moiety, and wherein the antibody specific to the viral antigen is specific to the viral protein, peptide fragment, nucleic acid, or sugar moiety.

[0293] Embodiment 4. The composition of embodiment 2, wherein the cell comprises one or more intracellular organelles for in vivo protein synthesis or protein secretion of the anti-viral agent.

[0294] Embodiment 5. The composition of embodiment 4, wherein the one or more intracellular organelles is selected from Golgi apparatus, ribosome, endoplasmic reticulum.

[0295] Embodiment 6. The composition of any previous embodiment, wherein the cell has a diameter of about 1 micrometers to 100 micrometers in length.

[0296] Embodiment 7. The composition of any previous embodiment, wherein the cell is a stem cell.

[0297] Embodiment 8. The composition of embodiment 7, wherein the stem cell is a mesenchymal stem cell or an induced pluripotent stem cell.

[0298] Embodiment 9. The composition of embodiment 8, wherein the mesenchymal stem cell is from adipose tissue or bone.

[0299] Embodiment 10. The composition of embodiment 8, wherein the induced pluripotent stem cell is from urine, saliva, hair, skin, or feces.

[0300] Embodiment 11. The composition of embodiments 2-10, wherein the viral antigen or the antibody specific to the viral antigen is expressed at a surface of the cell or is secretory.

[0301] Embodiment 12. The composition of any previous embodiment, wherein the viral antigen of the virus is tethered to a surface of the cell by a linker selected from a chemical linker, peptide linker, or a polymer.

[0302] Embodiment 13. The composition of any previous embodiment, wherein the anti-viral agent is specific to, or derived from, a virus is selected from:
[0303] b) a double stranded (ds) DNA viruses (e.g. Adenoviruses, Herpesviruses, Poxviruses);
[0304] c) a single stranded (ss) DNA viruses (+ strand or “sense”) DNA (e.g. Parvoviruses);
[0305] d) a dsRNA viruses (e.g. Reoviruses);
[0306] e) a (+)ssRNA viruses (+ strand or sense) RNA (e.g. Picornaviruses, Togaviruses);
[0307] f) a (−)ssRNA viruses (− strand or antisense) RNA (e.g. Orthomyxoviruses, Rhabdoviruses);
[0308] g) a ssRNA-RT viruses (+ strand or sense) RNA with DNA intermediate in life-cycle (e.g. Retroviruses); or
[0309] h) a dsDNA-RT viruses DNA with RNA intermediate in life-cycle (e.g. Hepadnaviruses)

[0310] Embodiment 14. The composition of any previous embodiment, wherein the anti-viral agent is derived from a respiratory virus, a skin virus, a foodborne virus, a sexually transmitted virus, or an oncolytic virus, or a combination thereof

[0311] Embodiment 15. The composition of embodiment 14, wherein the respiratory virus is selected from Rhinovirus, influenza virus, respiratory syncytial virus, and coronavirus.

[0312] Embodiment 16. The composition of embodiment 14, wherein the skin virus is selected from molluscum contagiosum, herpes simplex vius-1, and varicella-zoster virus.

[0313] Embodiment 17. The composition of embodiment 14, wherein the foodborne virus is selected from hepatitis A, norovirus, and rotavirus.

[0314] Embodiment 18. The composition of embodiment 14, wherein the sexually transmitted virus is selected from human papillomavirus, hepatitis B, genital herpes, and human immunodeficiency virus.

[0315] Embodiment 19. The composition of embodiment 14, wherein the oncolytic virus is human papilloma virus or hepatitis B.

[0316] Embodiment 20. The composition of embodiment 12, wherein the linker comprises glycosyl-phosphatidylinositol (GPI) or a B7-1 antigen (B7-1) cytoplasmic tail.

[0317] Embodiment 21. The composition of embodiment 3, wherein the viral antigen is a transmembrane peptide expressed in the cell.

[0318] Embodiment 22. The composition of embodiments 3-21, wherein the viral antigen is immunogenic to a human.

[0319] Embodiment 23. The composition of embodiment 3-22, wherein the viral antigen is a peptide derived from a coronavirus.

[0320] Embodiment 24. The composition of embodiment 23, wherein the coronavirus is severe acute respiratory syndrome coronavirus 2 (SARS-CoV-2), or a variant thereof.

[0321] Embodiment 25. The composition of embodiment 23 or 24, wherein the peptide is selected from a spike protein, a membrane protein, or a nucleoprotein derived from the coronavirus.

[0322] Embodiment 26. The composition of embodiments 25, wherein the cell comprises mRNA encoding the peptide.

[0323] Embodiment 27. The composition of embodiment 26, wherein the mRNA comprises an mRNA sequence that is at least 80% identical to SEQ ID NO: 1.

[0324] Embodiment 28. The composition of embodiment 26, wherein the mRNA comprises an mRNA sequence that is at least 85% identical to SEQ ID NO: 1.

[0325] Embodiment 29. The composition of embodiment 26, wherein the mRNA comprises an mRNA sequence that is at least 90% identical to SEQ ID NO: 1.

[0326] Embodiment 30. The composition of embodiment 26, wherein the mRNA comprises an mRNA sequence that is at least 91%, 92%, 93%, 94%, 95%, 96%, 97%, 98%, or 99% identical to SEQ ID NO: 1.

[0327] Embodiment 31. The composition of embodiment 26, wherein the mRNA comprises an mRNA sequence that is at least 100% identical to SEQ ID NO: 1.

[0328] Embodiment 32. The composition of embodiment 23-26, wherein the peptide comprises an amino acid sequence that is at least 70%, 75%, 80%, 85%, 90%, 91%, 92%, 93%, 94%, 95%, 96%, 97%, 98%, 99%, or 100% identical to SEQ ID NO: 2 or 8.

[0329] Embodiment 33. The composition of embodiments 26-32, wherein the mRNA has a half-life of 3-5 days.

[0330] Embodiment 34. The composition of embodiments 26-32, wherein the mRNA encodes a fusion protein comprising an albumin peptide.

[0331] Embodiment 35. The composition of embodiments 26-32, wherein the mRNA encodes a fusion protein comprising an immune-modulator.

[0332] Embodiment 36. The composition of embodiment 35, wherein the immune-modulator is an activator of an immune response in a subject.

[0333] Embodiment 37. The composition of embodiment 36, wherein the immune-modulator is granulocyte-macrophage colony-stimulating factor (GM-CSF) or a cytokine, or a combination thereof.

[0334] Embodiment 38. The composition of any previous embodiment, wherein the cell further comprises one or more homing receptors.

[0335] Embodiment 39. The composition of embodiment 38, wherein the one or more homing receptors is tethered to a surface of the cell by a linker selected from a chemical linker, a peptide linker, or a polymer.

[0336] Embodiment 40. The composition of embodiment 39, wherein the linker comprises glycosyl-phosphatidylinositol (GPI) or a B7-1 antigen (B7-1) cytoplasmic tail.

[0337] Embodiment 41. The composition of embodiment 38, wherein the one or more homing receptors is expressed on a surface of the cell.

[0338] Embodiment 42. The composition of embodiment 41, wherein the one or more homing receptors is genetically modified to increase expression of the one or more homing receptors on a surface of the cell.

[0339] Embodiment 43. The composition of embodiments 38-42, wherein the one or more homing receptors is specific to one or more ligands expressed on one or more cells in lymph tissue.

[0340] Embodiment 44. The composition of embodiment 43, wherein the one or more cells in the lymph tissue comprises endothelial cells, lymphocytes, macrophages, or reticular cells, or a combination thereof

[0341] Embodiment 45. The composition of embodiments 38-44, wherein the one or more homing receptors comprise two or more homing receptors specific to two or more ligands that are not the same.

[0342] Embodiment 46. The composition of embodiments 38-45, wherein the one or more homing receptors is selected from C-X-C chemokine receptor type 3 (CXCR3), leukosialin (CD43), CD44 antigen (CD44), C-C chemokine receptor type 7 (CCR7), L-selectin (CD62L), lymphocyte function-associated antigen 1 (LFA-1), or very late antigen-4 (VLA4).

[0343] Embodiment 47. The composition of embodiments 38-46, wherein the one or more homing receptors comprise L-Selectin (CD62L) and C-C chemokine receptor type 7 (CCR7).

[0344] Embodiment 48. The composition of embodiments 38-46, wherein the one or more homing receptors is specific to a ligand expressed in endothelial cells of the lymph tissue, and the viral antigen is effective to activate an immune response in a subject against a coronavirus, when composition is administered to the subject.

[0345] Embodiment 49. The composition of any previous embodiment, wherein the cell further comprises one or more immune-modulators.

[0346] Embodiment 50. The composition of embodiment 49, wherein the one or more immune-modulators is tethered to a surface of the cell.

[0347] Embodiment 51. The composition of embodiment 50, wherein the one or more immune-modulators is tethered to a surface of the cell using a linker comprising glycosyl-phosphatidylinositol (GPI) or a B7-1 antigen (B7-1) cytoplasmic tail.

[0348] Embodiment 52. The composition of embodiments 49-51, wherein the one or more immune-modulators is expressed on a surface of the cell.

[0349] Embodiment 53. The composition of embodiments 49-52, wherein the one or more immune-modulators is selected from the group consisting of granulocyte-macrophage colony-stimulating factor (GM-CSF), tumor necrosis factor alpha (TNF-alpha), lymphotoxin alpha (LTA), lymphotoxin beta (LTB), TNF superfamily member 4 (TNFSF4), CD40 ligand (CD40LG), fas ligand (FASLG), CD70 molecule (CD70), TNF superfamily member 8 (TNFSF8), TNF superfamily member 9 (TNFSF9), TNF superfamily member 10 (TNFSF10), TNF superfamily member 11 (TNFSF11), TNF superfamily member 12 (TNFSF12), TNF superfamily member 13 (TNFSF13), TNF superfamily member 13b (TNFSF13B), TNF superfamily member 14 (TNFSF14), TNF superfamily member 15 (TNFSF15), TNF superfamily 18 (TNFSF18), ectodysplasin A (EDA), cytokines, and viral antigen proteins.

[0350] Embodiment 54. The composition of embodiment 49-53, wherein the one or more immune-modulators is a fusion protein comprising an albumin peptide.

[0351] Embodiment 55. The composition of embodiments 1-54, wherein the composition is isolated.

[0352] Embodiment 56. The composition of embodiments 1-54, wherein the composition is purified.

[0353] Embodiment 57. The composition of embodiments 1-54, comprising a plurality of the cells in a suspension or in a cell culture, or both.

[0354] Embodiment 58. The composition of embodiments 1-57, wherein the composition is cryopreserved or was previously cryopreserved for at least 48 hours.

[0355] Embodiment 59. A method of delivering the composition of any previous embodiment, the method comprising administering to a subject in need thereof the composition by systemic delivery or direct delivery.

[0356] Embodiment 60. The method of embodiment 59, wherein systemic delivery comprises intravenous delivery or inhalation, and wherein direct delivery comprises intramuscular, intraperitoneal, and intra-lymph node, delivery.

[0357] Embodiment 61. The method of embodiments 59-60, further comprising substantially immunizing the subject from an infection by a live virus comprising the composition subsequent to the delivery.

[0358] Embodiment 62. A method of preventing viral infection in a subject, the method comprising administering the composition of embodiments 1-58 to the subject, thereby substantially immunizing the subject from an infection by a live virus comprising the composition.

[0359] Embodiment 63. A method of treating an acute viral infection in a subject, the method comprising administering the composition of embodiments 1-58 to the subject, thereby reducing the viral load in the subject.

[0360] Embodiment 64. A method of preventing a disease caused by a coronavirus in a subject, the method comprising administering the composition of embodiments 1-58 to the subject, thereby preventing the disease caused by the coronavirus.

[0361] Embodiment 65. A method of treating a disease caused by a coronavirus in a subject, the method comprising administering the composition of embodiments 1-58 to the subject, thereby treating the disease caused by the coronavirus.

[0362] Embodiment 66. The method of embodiments 64 and 65, wherein the disease is coronavirus disease of 2019 (COVID-19).

[0363] Embodiment 67. The method of embodiments 59-66, further comprising: (a) receiving the composition stored in a suspension at 4 degrees Celsius for at least 48 hours, wherein the composition has a slowed or stopped biological activity; and (b) removing the composition from the suspension, thereby reviving the biological activity of the composition.

### Methods of Manufacturing

[0364] Disclosed herein are methods of utilizing a cytoplast to produce compositions in accordance with the embodiments below:

[0365] Embodiment 1. A method of manufacturing a composition, the method comprising:

[0366] (a) introducing a first nucleic acid encoding a first viral antigen or an anti-viral antibody to a parent cell, the parent cell comprising:
[0367] i) a nucleus; and
[0368] ii) one or more intracellular organelles for protein synthesis or protein secretion; and

[0369] (b) mechanically removing the nucleus from the parent stem cell to produce an enucleated stem cell, wherein the enucleated stem cell comprises the one or more intracellular organelles.

[0370] Embodiment 2. A method of manufacturing a composition, the method comprising:
[0371] (a) introducing a first nucleic acid encoding a first viral antigen or an anti-viral antibody to an enucleated stem cell, the enucleated stem cell comprising one or more intracellular organelles for protein synthesis or protein secretion of the first viral antigen or the anti-viral antibody; and
[0372] (b) expressing the first viral antigen or the anti-viral antibody in the enucleated stem cell.

[0373] Embodiment 3. The method of embodiments 1 and 2, wherein the first viral antigen is expressed at a surface of the enucleated stem cell.

[0374] Embodiment 4. The method of any previous embodiments, wherein the first viral antigen or the anti-viral antibody is secretory.

[0375] Embodiment 5. The method of any previous embodiments, further comprising storing the enucleated stem cell in a suspension at a temperature below the freezing temperature of the suspension for at least 24 hours, 48 hours, or 96 hours.

[0376] Embodiment 6. The method of any previous embodiments, further comprising introducing a second nucleic acid encoding a second viral antigen, wherein the first and second nucleic acids are not identical and the first and second viral antigens are not identical.

[0377] Embodiment 7. The method of any previous embodiments, further comprising introducing a plurality of nucleic acids encoding a plurality of viral antigens that differ from the first viral antigen.

[0378] Embodiment 8. The method of any previous embodiments, wherein the nucleic acid is a messenger RNA (mRNA).

[0379] Embodiment 9. The method of any previous embodiments, wherein the nucleic acid is DNA.

[0380] Embodiment 10. The method of any previous embodiments, wherein the first viral antigen is derived from a mammal.

[0381] Embodiment 11. The method of any previous embodiment, wherein the antiviral antibody is specific to a coronavirus.

[0382] Embodiment 12. The method of any previous embodiment, wherein the first viral antigen is an attenuated viral particle derived from a coronavirus.

[0383] Embodiment 13. The method of any previous embodiment, wherein the first viral antigen is tethered to a surface of the enucleated stem cell by a linker selected from a chemical linker, a peptide linker, or a polymer.

[0384] Embodiment 14. The method of embodiment 13, wherein the linker comprises glycosyl-phosphatidylinositol (GPI) or a B7-1 antigen (B7-1) cytoplasmic tail.

[0385] Embodiment 15. The method of any previous embodiment, wherein the first viral antigen is a transmembrane peptide expressed in the enucleated stem cell.

[0386] Embodiment 16. The method of any previous embodiment, wherein the first viral antigen is immunogenic to a human.

[0387] Embodiment 17. The method of any previous embodiment, wherein the first viral antigen is a peptide derived from a coronavirus.

[0388] Embodiment 18. The method of embodiment 17, wherein the peptide is selected from a spike protein, a membrane protein, or a nucleoprotein derived from the coronavirus.

[0389] Embodiment 19. The method of embodiment 18, wherein the coronavirus is severe acute respiratory syndrome coronavirus 2 (SARS-CoV-2), or a variant thereof

[0390] Embodiment 20. The method of embodiments 17-19, wherein the enucleated stem cell comprises mRNA encoding the peptide.

[0391] Embodiment 21. The method of embodiment 20, wherein the mRNA comprises an mRNA sequence that is at least 80% identical to SEQ ID NO: 1.

[0392] Embodiment 22. The method of embodiment 20, wherein the mRNA comprises an mRNA sequence that is at least 85% identical to SEQ ID NO: 1.

[0393] Embodiment 23. The method of embodiment 20, wherein the mRNA comprises an mRNA sequence that is at least 90% identical to SEQ ID NO: 1.

[0394] Embodiment 24. The method of embodiment 20, wherein the mRNA comprises an mRNA sequence that is at least 91%, 92%, 93%, 94%, 95%, 96%, 97%, 98%, or 99% identical to SEQ ID NO: 1.

[0395] Embodiment 25. The method of embodiment 20, wherein the mRNA comprises an mRNA sequence that is at least 100% identical to SEQ ID NO: 1.

[0396] Embodiment 26. The method of embodiments 17-20, wherein the peptide comprises an amino acid sequence that is at least 70%, 75%, 80%, 85%, 90%, 91%, 92%, 93%, 94%, 95%, 96%, 97%, 98%, 99%, or 100% identical to SEQ ID NO: 2.

[0397] Embodiment 27. The method of embodiments 20-26, wherein the mRNA has a half-life of 3-5 days.

[0398] Embodiment 28. The method of embodiments 20-26, wherein the mRNA encodes a fusion protein comprising an albumin peptide.

[0399] Embodiment 29. The method of embodiments 20-26, wherein the mRNA encodes a fusion protein comprising an immune-modulator.

[0400] Embodiment 30. The method of embodiment 29, wherein the immune-modulator is an activator of an immune response in a subject.

[0401] Embodiment 31. The method of embodiment 30, wherein the immune-modulator is granulocyte-macrophage colony-stimulating factor (GM-CSF) or a cytokine, or a combination thereof.

[0402] Embodiment 32. The method of any previous embodiment, wherein the enucleated stem cell further comprises one or more homing receptors.

[0403] Embodiment 33. The method of embodiment 32, wherein the one or more homing receptors is tethered to a surface of the enucleated stem cell by a linker selected from a chemical linker, a peptide linker, or a polymer.

[0404] Embodiment 34. The method of embodiment 33, wherein the linker comprises glycosyl-phosphatidylinositol (GPI) or a B7-1 antigen (B7-1) cytoplasmic tail.

[0405] Embodiment 35. The method of embodiment 32, wherein the one or more homing receptors is expressed on a surface of the enucleated stem cell.

[0406] Embodiment 36. The method of embodiment 32-35, wherein the one or more homing receptors is genetically modified to increase expression of the one or more homing receptors on a surface of the enucleated stem cell.

[0407] Embodiment 37. The method of embodiments 32-36, wherein the one or more homing receptors is specific to one or more ligands expressed on one or more cells in lymph tissue.

[0408] Embodiment 38. The method of embodiment 37, wherein the one or more cells in the lymph tissue is selected from endothelial cells, lymphocytes, macrophages, or reticular cells, or a combination thereof

[0409] Embodiment 39. The method of embodiments 32-38, wherein the one or more homing receptors comprise two or more homing receptors specific to two or more ligands that are not the same.

[0410] Embodiment 40. The method of embodiments 32-39, wherein the one or more homing receptors is selected from C-X-C chemokine receptor type 3 (CXCR3), leukosialin (CD43), CD44 antigen (CD44), C-C chemokine receptor type 7 (CCR7), L-selectin (CD62L), lymphocyte function-associated antigen 1 (LFA-1), or very late antigen-4 (VLA4).

[0411] Embodiment 41. The method of embodiments 32-40, wherein the one or more homing receptors comprise L-Selectin (CD62L) and C-C chemokine receptor type 7 (CCR7).

[0412] Embodiment 42. The method of embodiment 32-41, wherein the one or more homing receptors is specific to a ligand expressed in endothelial cells of the lymph tissue, and the viral antigen is effective to activate an immune response in a subject against a coronavirus, when the viral antigen is administered to the subject.

[0413] Embodiment 43. The method of any previous embodiment, wherein the enucleated stem cell further comprises one or more immune-modulators.

[0414] Embodiment 44. The method of embodiment 43, wherein the one or more immune-modulators is tethered to a surface of the enucleated stem cell.

[0415] Embodiment 45. The method of embodiment 44, wherein the one or more immune-modulators is tethered to a surface of the enucleated stem cell using a linker comprising glycosyl-phosphatidylinositol (GPI) or a B7-1 antigen (B7-1) cytoplasmic tail.

[0416] Embodiment 46. The method of embodiments 43-45, wherein the one or more immune-modulators is expressed on a surface of the enucleated stem cell.

[0417] Embodiment 47. The method of embodiment 43-46, wherein the one or more immune-modulators is selected from the group consisting of granulocyte-macrophage colony-stimulating factor (GM-CSF), tumor necrosis factor alpha (TNF-alpha), lymphotoxin alpha (LTA), lymphotoxin beta (LTB), TNF superfamily member 4 (TNFSF4), CD40 ligand (CD40LG), fas ligand (FASLG), CD70 molecule (CD70), TNF superfamily member 8 (TNFSF8), TNF superfamily member 9 (TNFSF9), TNF superfamily member 10 (TNFSF10), TNF superfamily member 11 (TNFSF11), TNF superfamily member 12 (TNFSF12), TNF superfamily member 13 (TNFSF13), TNF superfamily member 13b (TNFSF13B), TNF superfamily member 14 (TNFSF14), TNF superfamily member 15 (TNFSF15), TNF superfamily 18 (TNFSF18), ectodysplasin A (EDA), cytokines, and viral antigen proteins.

[0418] Embodiment 48. The method of embodiments 43-47, wherein the one or more immune-modulators is a fusion protein comprising an albumin peptide.

[0419] Embodiment 49. The method of embodiments 1-48, wherein the method further comprises isolating the enucleated stem cell.

[0420] Embodiment 50. The method of embodiments 1-48, wherein the method further comprises purifying the enucleated stem cell.

[0421] Embodiment 51. The method of embodiments 1-48, wherein the enucleated stem cell is a plurality of enucleated stem cells in a suspension or in a cell culture, or both.

[0422] Embodiment 52. The method of embodiments 1-48, wherein the method further comprises cryopreserving the enucleated stem cell for at least 48 hours.

[0423] Embodiment 53. A method of preventing a disease caused by a coronavirus in a subject, the method comprising administering the composition of embodiments 1-48 to the subject, thereby preventing the disease caused by the coronavirus.

[0424] Embodiment 54. A method of treating a disease caused by a coronavirus in a subject, the method comprising administering the composition of embodiments 1-48 to the subject, thereby treating the disease caused by the coronavirus.

[0425] Embodiment 55. The method of embodiments 53 and 54, wherein the disease is coronavirus disease of 2019 (COVID-19).

[0426] Embodiment 56. The method of embodiments 1-55, further comprising: (a) receiving the enucleated stem cell stored in a suspension at 4 degrees Celsius for at least 48 hours, wherein the enucleated stem cell has a slowed or stopped biological activity; and (b) removing the enucleated stem cell from the suspension, thereby reviving the biological activity of the enucleated stem cell.

### Methods of Virus Trapping

[0427] Embodiment 1. A method of clearing a pathogen in a subject, the method comprising:

[0428] (a) administering to a subject in need thereof a plurality of cells substantially free of nuclei;

[0429] (b) sequestering a pathogen in a tissue of the subject by:
[0430] i. permitting infection in vivo of the plurality of cells administered to the subject in (a) by the pathogen; and
[0431] ii. once the plurality of cells are infected, preventing propagation of the pathogen;
[0432] iii. removing the plurality of cells from the subject by phagocytosis, thereby eliminating the pathogen from the subject.

[0433] Embodiment 2. The method of embodiment 1, wherein a number of pathogens is reduced in a dose-dependent manner to administration in (a) of the plurality of cells.

[0434] Embodiment 3. The method of any previous embodiment, wherein the plurality of cells expresses one or more immune-modulators, and wherein the one or more immune-modulators is expressed at a surface of a cell in the plurality of cells, or secreted by a cell in the plurality of cells.

[0435] Embodiment 4. The method of embodiment 3, wherein the one or more immune-modulators is tethered to a surface of a cell in the plurality of cells.

[0436] Embodiment 5. The method of embodiment 4, wherein the one or more immune-modulators is tethered to a surface of a cell using a linker comprising glycosyl-phosphatidylinositol (GPI) or a B7-1 antigen (B7-1) cytoplasmic tail.

[0437] Embodiment 6. wherein the one or more immune-modulators is selected from the group consisting of granulocyte-macrophage colony-stimulating factor (GM-CSF), tumor necrosis factor alpha (TNF-alpha), lymphotoxin alpha (LTA), lymphotoxin beta (LTB), TNF superfamily member 4 (TNFSF4), CD40 ligand (CD40LG), fas ligand (FASLG), CD70 molecule (CD70), TNF superfamily member 8 (TNFSF8), TNF superfamily member 9 (TNFSF9), TNF superfamily member 10 (TNFSF10), TNF superfamily member 11 (TNFSF11), TNF superfamily member 12 (TNFSF12), TNF superfamily member 13 (TNFSF13), TNF superfamily member 13b (TNFSF13B), TNF superfamily member 14 (TNFSF14), TNF superfamily member 15 (TNFSF15), TNF superfamily 18 (TNFSF18), ectodysplasin A (EDA), one or more cytokines, and viral antigen proteins.

[0438] Embodiment 7. The method of embodiment 6, wherein the one or more cytokines is selected from interleukin 10 and interleukin 12.

[0439] Embodiment 8. The method of any previous embodiment, wherein the plurality of cells are engineered to express one or more homing receptors specific to a target tissue, and wherein the one or more homing receptors is expressed at a surface of a cell in the plurality of cells, or secreted by a cell in the plurality of cells.

[0440] Embodiment 9. The method of embodiment 8, wherein the target tissue is the lung or lymph tissue.

[0441] Embodiment 10. The method of embodiment 9, wherein the one or more homing receptors targets endothelial cells, lymphocytes, macrophages, or reticular cells, or a combination thereof, in the lymph tissue.

[0442] Embodiment 11. The method of embodiments 8-10, wherein the one or more homing receptors is tethered to a surface of a cell in the plurality of cells by a linker selected from a chemical linker, a peptide linker, or a polymer.

[0443] Embodiment 12. The method of embodiment 11, wherein the linker comprises glycosyl-phosphatidylinositol (GPI) or a B7-1 antigen (B7-1) cytoplasmic tail.

[0444] Embodiment 13. The method of embodiments 8-12, wherein the one or more homing receptors is genetically modified to increase expression of the one or more homing receptors on a surface of a cell in the plurality of cells.

[0445] Embodiment 14. The method of embodiments 8-13, wherein the one or more homing receptors comprise two or more homing receptors specific to two or more target tissues that are not the same.

[0446] Embodiment 15. The method of embodiments 8-14, wherein the one or more homing receptors is selected from C-X-C chemokine receptor type 3 (CXCR3), leukosialin (CD43), CD44 antigen (CD44), C-C chemokine receptor type 7 (CCR7), L-selectin (CD62L), lymphocyte function-associated antigen 1 (LFA-1), or very late antigen-4 (VLA4).

[0447] Embodiment 16. The method of embodiment 1, wherein a cell of the plurality of cells comprises a viral antigen.

[0448] Embodiment 17. The method of embodiment 16, wherein the viral antigen is expressed on a surface of the cell in the plurality of cells.

[0449] Embodiment 18. The method of embodiment 16, wherein the viral antigen is tethered to a surface of a cell in the plurality of cells by a linker selected from a chemical linker, a peptide linker, or a polymer.

[0450] Embodiment 19. The method of embodiment 18, wherein the linker comprises glycosyl-phosphatidylinositol (GPI) or a B7-1 antigen (B7-1) cytoplasmic tail.

[0451] Embodiment 20. The method of embodiments 16-19, wherein the viral antigen is a transmembrane peptide expressed in a cell in the plurality of cells.

[0452] Embodiment 21. The method of embodiments 16-20, wherein the viral antigen is immunogenic to a human.

[0453] Embodiment 22. The method of embodiments 16-21, wherein the viral antigen is a peptide derived from a coronavirus.

[0454] Embodiment 23. The method of embodiment 22, wherein the peptide is selected from a spike protein, a membrane protein, or a nucleoprotein derived from the coronavirus.

[0455] Embodiment 24. The method of embodiment 23, wherein the coronavirus is severe acute respiratory syndrome coronavirus 2 (SARS-CoV-2), or a variant thereof

[0456] Embodiment 25. The method of embodiments 22-24, wherein a cell in the plurality of cells comprises mRNA encoding the peptide.

[0457] Embodiment 26. The method of embodiment 25, wherein the mRNA comprises an mRNA sequence that is at least 80% identical to SEQ ID NO: 1.

[0458] Embodiment 27. The method of embodiment 25, wherein the mRNA comprises an mRNA sequence that is at least that is at least 85% identical to SEQ ID NO: 1.

[0459] Embodiment 28. The method of embodiment 25, wherein the mRNA comprises an mRNA sequence that is at least 90% identical to SEQ ID NO: 1.

[0460] Embodiment 29. The method of embodiment 25, wherein the mRNA comprises an mRNA sequence that is at least 91%, 92%, 93%, 94%, 95%, 96%, 97%, 98%, or 99% identical to SEQ ID NO: 1.

[0461] Embodiment 30. The method of embodiment 25, wherein the mRNA comprises an mRNA sequence that is at least 100% identical to SEQ ID NO: 1.

[0462] Embodiment 31. The method of embodiment 22-25, wherein the peptide comprises an amino acid sequence that is at least 70%, 75%, 80%, 85%, 90%, 91%, 92%, 93%, 94%, 95%, 96%, 97%, 98%, 99%, or 100% identical to SEQ ID NO: 2.

[0463] Embodiment 32. The method of embodiments 25-31, wherein the mRNA has a half-life of 3-5 days.

[0464] Embodiment 33. The method of embodiments 25-31, wherein the mRNA encodes a fusion protein comprising an albumin peptide.

[0465] Embodiment 34. The method of embodiments 25-31, wherein the mRNA encodes a fusion protein comprising an immune-modulator.

[0466] Embodiment 35. The method of embodiment 34, wherein the immune-modulator is an activator of an immune response in a subject.

[0467] Embodiment 36. The method of embodiment 34, wherein the immune-modulator is granulocyte-macrophage colony-stimulating factor (GM-CSF) or a cytokine, or a combination thereof.

[0468] Embodiment 37. The method of any previous embodiment, wherein the pathogen is a live virus selected from a respiratory virus, a skin virus, a foodborne virus, a sexually transmitted virus, or an oncolytic virus, or a combination thereof

[0469] Embodiment 38. The method of embodiment 37, wherein the respiratory virus is selected from Rhinovirus, influenza virus, respiratory syncytial virus, and coronavirus.

[0470] Embodiment 39. The method of embodiment 38, wherein the coronavirus is severe acute respiratory syndrome coronavirus 2 (SARS-CoV-2), or a variant thereof

[0471] Embodiment 40. The method of embodiment 37, wherein the skin virus is selected from molluscum contagiosum, herpes simplex vius-1, and varicella-zoster virus.

[0472] Embodiment 41. The method of embodiment 37, wherein the foodborne virus is selected from hepatitis A, norovirus, and rotavirus.

[0473] Embodiment 42. The method of embodiment 37, wherein the sexually transmitted virus is selected from human papillomavirus, hepatitis B, genital herpes, and human immunodeficiency virus.

[0474] Embodiment 43. The method of embodiment 37, wherein the oncolytic virus is human papilloma virus or hepatitis B.

[0475] Embodiment 44. The method of any previous embodiment, wherein administering in (a) is intra-peritoneal, intra-tumoral, intra-venous, intra-lymphatic, intra-muscular, or inhalation.

[0476] Embodiment 45. The method of embodiment 1, wherein the pathogen is a live virus is selected from:
[0477] a) a double stranded (ds) DNA viruses (e.g. Adenoviruses, Herpesviruses, Poxviruses);
[0478] b) a single stranded (ss) DNA viruses (+ strand or “sense”) DNA (e.g. Parvoviruses);
[0479] c) a dsRNA viruses (e.g. Reoviruses);
[0480] d) a (+)ssRNA viruses (+ strand or sense) RNA (e.g. Picornaviruses, Togaviruses);
[0481] e) a (−)ssRNA viruses (− strand or antisense) RNA (e.g. Orthomyxoviruses, Rhabdoviruses);
[0482] f) a ssRNA-RT viruses (+ strand or sense) RNA with DNA intermediate in life-cycle (e.g. Retroviruses); or
[0483] g) a dsDNA-RT viruses DNA with RNA intermediate in life-cycle (e.g. Hepadnaviruses)

[0484] Embodiment 46. The method of embodiments 1-36, wherein the pathogen is a bacteria, virus, parasite, fugus, autoantibody, antibody, poisonous substance, toxic substance, or a combination thereof

[0485] Embodiment 47. The method of embodiments 1-46, further comprising: (a) receiving the plurality of cells stored in a suspension at 4 degrees Celsius for at least 48 hours, wherein the plurality of cells has a slowed or stopped biological activity; and (b) removing the plurality of cells from the suspension, thereby reviving the biological activity of the plurality of cells.

### Compositions for Pathogen Trapping

[0486] Embodiment 1. A cell without a nucleus, the cell comprising: one or more intracellular organelles for synthesis of a receptor for a pathogenic antigen or a pathogen antigen-binding fragment thereof in absence of the nucleus.

[0487] Embodiment 2. The cell without the nucleus of embodiment 1, wherein the one or more intracellular organelles is an endoplasmic reticulum or a Golgi apparatus.

[0488] Embodiment 3. The cell without the nucleus of any one of embodiments 1-2, wherein the receptor for the pathogenic antigen or the pathogen antigen-binding fragment thereof is coupled to a surface of the cell without the nucleus.

[0489] Embodiment 4. The cell without the nucleus of any one of embodiments 1-3, wherein the receptor for the pathogenic antigen or the pathogen antigen-binding fragment thereof comprises a transmembrane domain that couples the receptor for the pathogenic antigen or the pathogen antigen-binding fragment thereof to the surface of the cell without the nucleus.

[0490] Embodiment 5. The cell without the nucleus of any one of embodiments 1-4, wherein the cell without the nucleus further comprises an immune-modulator comprising granulocyte-macrophage colony-stimulating factor.

[0491] Embodiment 6.The cell without the nucleus of any one of embodiments 1-5, wherein the cell without the nucleus has a diameter that is between about 1 micrometers (μm) to 100 μm.

[0492] Embodiment 7. The cell without the nucleus of embodiment 6, wherein the diameter is about 8 μm.

[0493] Embodiment 8.The cell without the nucleus of any one of embodiments 1-7, wherein the cell without the nucleus is viable following cryohibernation for at least 24 hours.

[0494] Embodiment 9. The cell without the nucleus of any one of embodiments 1-7, wherein the cell without the nucleus is viable following cryopreservation for at least 24 hours

[0495] Embodiment 10. The cell without the nucleus of any one of embodiments 1-9, wherein the cell without the nucleus is cryopreserved, cryohybernated, or lyophilized.

[0496] Embodiment 11. The cell without the nucleus of any one of embodiments 1-10, wherein the cell without a nucleus is isolated or purified.

[0497] Embodiment 12. The cell without the nucleus of any one of embodiments 1-11, wherein the pathogenic antigen is an antigen of a coronavirus.

[0498] Embodiment 13. The cell without the nucleus of embodiment 12, wherein the coronavirus is SARS-CoV-2.

[0499] Embodiment 14. The cell without the nucleus of any one of embodiments 1-13, further comprising a neutralizing antibody that blocks binding between the pathogen antigen and its natural receptor produced by a host cell.

[0500] Embodiment 15. The cell without the nucleus of any one of embodiments 1-14, further comprising one or more immune-modulators.

[0501] Embodiment 16. The cell without the nucleus of embodiment 15, wherein the one or more immune-modulators is tethered to a surface of a cell without the nucleus using a linker comprising glycosyl-phosphatidylinositol (GPI) or a B7-1 antigen (B7-1) cytoplasmic tail.

[0502] Embodiment 17. The cell without the nucleus of embodiment 15, wherein the one or more immune-modulators is selected from the group consisting of granulocyte-macrophage colony-stimulating factor (GM-CSF), tumor necrosis factor alpha (TNF-alpha), lymphotoxin alpha (LTA), lymphotoxin beta (LTB), TNF superfamily member 4 (TNFSF4), CD40 ligand (CD40LG), fas ligand (FASLG), CD70 molecule (CD70), TNF superfamily member 8 (TNFSF8), TNF superfamily member 9 (TNFSF9), TNF superfamily member 10 (TNFSF10), TNF superfamily member 11 (TNFSF11), TNF superfamily member 12 (TNFSF12), TNF superfamily member 13 (TNFSF13), TNF superfamily member 13b (TNFSF13B), TNF superfamily member 14 (TNFSF14), TNF superfamily member 15 (TNFSF15), TNF superfamily 18 (TNFSF18), ectodysplasin A (EDA), one or more cytokines, and viral antigen proteins.

[0503] Embodiment 18. The cell without the nucleus of any one of embodiments 1-17, further comprising one or more homing receptors specific to a target tissue.

[0504] Embodiment 19. The cell without the nucleus of embodiment 18, wherein the one or more homing receptors targets endothelial cells, lymphocytes, macrophages, or reticular cells, or a combination thereof, in the lymph tissue.

[0505] Embodiment 20. The cell without the nucleus of embodiment 18, wherein the one or more homing receptors is tethered to a surface of a cell in the plurality of cells by a linker selected from a chemical linker, a peptide linker, or a polymer.

[0506] Embodiment 21. The cell without the nucleus of embodiment 20, wherein the linker comprises glycosyl-phosphatidylinositol (GPI) or a B7-1 antigen (B7-1) cytoplasmic tail.

[0507] Embodiment 22. The cell without the nucleus of any one of embodiments 18-21, wherein the one or more homing receptors is selected from C-X-C chemokine receptor type 3 (CXCR3), leukosialin (CD43), CD44 antigen (CD44), C-C chemokine receptor type 7 (CCR7), L-selectin (CD62L), lymphocyte function-associated antigen 1 (LFA-1), or very late antigen-4 (VLA4).

[0508] Embodiment 23. The cell without the nucleus of any one of embodiments 1-23, further comprising a viral antigen.

[0509] Embodiment 24. A pharmaceutical formulation comprising:

[0510] the cell without the nucleus of any one of embodiments 1-23 or a plurality of the cell without the nucleus of any one of embodiments 1-23; and

[0511] a pharmaceutically acceptable: excipient, diluent, or carrier.

[0512] Embodiment 25. A method of reducing an infection by a pathogen in a subject, the method comprising: administering to a subject the cell without the nucleus of any one of embodiments 1-23 or the pharmaceutical formulation of embodiment 24, thereby trapping a pathogen having the pathogen antigen in the cell and preventing the pathogen from propagating within the cell.

[0513] Embodiment 26. The method of embodiment 25, wherein the pathogen is cleared from the subject in 14 days or fewer following administration.

[0514] Embodiment 27. The method of any one of embodiments 26-27, wherein the cell without the nucleus releases the neutralizing antibody, thereby blocking binding between the pathogen antigen of the pathogen and its natural receptor produced by a host cell.

[0515] Embodiment 28. The method of any one of embodiments 26-28, wherein the cell without the nucleus presents the viral antigen, thereby immunizing the subject from an infection by the pathogen.

### VII. EXAMPLES

[0516] The following examples are included for illustrative purposes only and are not intended to limit the scope of the invention.

### Example 1

### Method of Producing an Anti-Viral Composition for Coronavirus

[0517] Lentiviral-mediated transfection of stem cell (e.g., mesenchymal stem cell) with a heterologous nucleic acid encoding an attenuated coronavirus antigen is performed. Next, enucleation of the stem cell by methods described in Example 7 is performed. Enucleated stem cells expressing the attenuated coronavirus antigen at the surface of the cell are verified using flow cytometry. Successfully enucleated stem cells expressing the attenuated corona virus antigen (referred to as “cytoplast” in this example) are isolated and purified according to known methods. Optionally, the cytoplasts are cryopreserved using the methods provided in Example 4. The cytoplasts described above are useful as a vaccine for the preventing of coronavirus infection.

[0518] A second anti-viral composition for coronavirus is produced using similar methodology as above, but instead of an attenuated coronavirus antigen, an antibody against coronavirus is expressed in the stem cell. Alternatively, or in addition, a small molecule against coronavirus is loaded into the enucleated stem cell using electroporation (or comparable methods known in the art). The successfully enucleated stem cells expressing the anti-viral antibody against coronavirus and/or the small molecule against coronavirus (referred to as “cytoplast” in this example) are isolated and purified according to known methods. Optionally, the cytoplasts are cryopreserved using the methods provided in Example 4. The cytoplasts described above are useful to treat acute coronavirus infection.

### Example 2

### Preventing Coronavirus Infection in a Subject

[0519] The anti-viral composition described in Example 1 expressing the attenuated coronavirus or a peptide fragment of a coronaviral protein is formulated for intravenous administration. The attenuated coronavirus or the peptide fragment of the coronaviral protein may be encoded from mRNA encapsulated in the cytoplasts described herein. In some embodiments, the anti-viral composition is formulated for intramuscular administration. In some embodiments, the subject receives a first and a second dose of the anti-viral compositions. In some embodiments, the second dose of the anti-viral composition is administered at least 1 day, 2 day, 3 day, 4 day, 1 week, 2 weeks, 3 weeks, 4 weeks, 1 month, 2 months, 3 months, or 4 months after the administration of the first does. The formulation is administered intravenously to a subject. For example, administration to a human subject would be performed at least 5 times when the subject is a child. In some embodiments, the formulation is administered to the subject when the subject is age 2 months old, 4 months old, 6 months old, between 15-18 months old, and between 4-6 years old. In this example, the subject becomes immunized from a coronavirus infection.

### Example 3

### Treating an Acute Coronavirus Infection in a Subject

[0520] The anti-viral composition described in Example 1 expressing the anti-coronavirus antibody (e.g., neutralizing antibody) or small molecule against coronavirus is formulated for intravenous administration. The formulation is administered intravenously to a subject infected, or suspected of being infected with, coronavirus. In some embodiments, administration is performed more than once. For example administration may be performed every day, every two days, every week, every two weeks, every month, every two months, for a period of time (for e.g., 1 year). In this example, the coronavirus infection is reduced in the subject.

[0521] Alternatively, or in addition, enucleated stem cells (e.g., mesenchymal stem cell) without a payload are formulated for intravenous administration. The formulation is administered intravenously to a subject infected, or suspected of being infected with, coronavirus. In some embodiments, administration is performed more than one. For example administration may be performed every day, every two days, every week, every two weeks, every month, every two months, for a period of time (for e.g., 1 year). In this example, the cytoplasts are infected with the coronavirus in vivo and become trapped in the cytoplast. Cytoplasts lacking a nucleus lack the genetic material required for coronavirus replication and propagation, thereby preventing the coronavirus from further infection. In this example the coronavirus infection is reduced.

### Example 4

### Producing Cytoplasts from Mammalian Cells

[0522] Cytoplasts can be generated from allogenic or autologous donor-derived cells, and can be used for disease treatment as well as for diagnostics. As a proof of concept, the enucleation efficiency and recovery rate of various types of mammalian cells (e.g., mesenchymal stem cells, neutrophils, fibroblast, and natural killer cells) was determined. After removal of the mammalian cells from the cell culture plates, the mammalian cells were enucleated by density gradient centrifugation using discontinuous Ficoll gradients, high-speed centrifugation. Table 1 summarizes the results of enucleation using a suspension protocol. Enucleation efficiency and cell viability was the highest in both hTERT transformed and primary mesenchymal stem cells (MSCs), as well as in fibroblasts and neutrophils. Table 2 summarizes the results of enucleation using an adherent protocol. Enucleation efficiency was greater than 70% in both mesenchymal stem cells and macrophages. This experiment showed that various types of mammalian cells could undergo enucleation using any of the methods described herein.

TABLE 1
Enucleation efficiency and viability determinations of mammalian
cells using the suspension protocol.

| | | | | Viability | |
|---|---|---|---|---|---|
| | | Enucleation | Recovery | after | Yield per |
| Cell type | | Efficiency | Rate | 24 hours | run |
| MSC cells | AD-MSC | 90%-95% | 60%-90% | 80%-95% | 12-15M |
| | (hTERT) | | | | |
| | UC-MSC | 85%-90% | 60%-80% | 80%-95% | 10-15M |
| | (primary) | | | | |
| | BM-MSC | 80%-90% | 40%-50% | 80%-90% | ~8M |
| | (primary) | | | | |
| NK cells | NKL | 50%-85% | 20%-50% | 50%-75% | ~8M |
| | NK-92 | 70%-90% | 20%-40% | 20%-40% | ~5M |
| Macrophages | RAW | 85%-95% | 40%-70% | 20%-40% | ~15M |
| | 264.7 | | | | |
| Neutrophils | HL-60 | 60%-98% | 20%-40% | 60%-80% | ~15M |
| Fibroblasts | L929 | 70%-90% | 50%-70% | 70%-90% | ~15M |
| | NIH3T3 | 70%-80% | 40%-50% | 70%-80% | ~9M |

Enucleation efficiency = enucleated cells versus total recovered cells;
Recovery rate = recovered cells versus total input cells used for enucleation.
Viability after 24 hours = live cells measured by Trypan blue staining versus total cells;
Yield per run = the number of cytoplasts harvested for each run;
M = million cells
AD-MSC (hTERT) = human hTERT immortalized adipose-derived mesenchymal stem cells;
BM-MSC (primary) = human primary bone marrow-derived mesenchymal stem cells;
NK = natural killer cells.

TABLE 2
Enucleation efficiencies and viability determinations of mammalian
cells using the adherent protocol

| | | | | Viability | |
|---|---|---|---|---|---|
| | | Enucleation | Recovery | after | Yield |
| Cell type | | Efficiency | Rate | 24 hours | per run |
| MSC cells | AD-MSC | 70%-95% | 40%-60% | 80%-95% | 1M |
| | (hTERT) | | | | |
| Macrophages | RAW 264.7 | 85%-95% | 40%-70% | 10%-30% | ~1M |

Enucleation efficiency = enucleated cells versus total recovered cells;
Recovery rate = recovered cells versus total input cells used for enucleation.
Viability after 24 hours = live cells measured by Trypan blue staining versus total cells;
Yield per run = the number of cytoplasts harvested for each run;
M = million cells

[0523] Next, the survival of cytoplasts was determined across 96 hours. Whereas MSC proliferated over-time, cytoplasts did not. Instead, the relative fold change in viable cytoplasts remained fairly constant for 72 hours before declining at 96 hours. Thus, cytoplast survival spanned 3-4 days. As most cell-based therapies are not used immediately, the viability of cytoplasts after cryopreservation was determined. Surprisingly, the viability of cytoplast after cryopreservation was greater than the viability of MSC following cryopreservation. Cytoplasts plated immediately after enucleation and cytoplasts recovered from cryopreservation displayed similar relative cell viability after 24 hours. This experiment showed that cytoplasts survival was not affected by cryopreservation. Additionally, the viability of cytoplasts after cryohibernation was similar to the viability of MSC following cryohibernation (FIG. 6A). Cytoplasts recovered after cryohibernation for various lengths of time were able to undergo induced migration in a Boyden chamber assay similar to MSCs recovered after cryohibernation, (FIG. 6B).

[0524] Next, a large-scale production of cells was set up ex vivo, followed by large-capacity density gradient centrifugation and enucleation, which lead to the generation of a therapeutic cytoplast. In one embodiment, the therapeutic cytoplast is loaded with therapeutic cargo (e.g., mRNA, drugs, peptides, etc.) for disease treatment. In another embodiment, the therapeutic cytoplast is prepared for immediate use (e.g., for intravenous injection (IV), intraperitoneal injection (IP), tissue, or in vitro applications) for diagnostic use.

### Example 5

### Cytoplasts Possess Organelles, Interact with the Extracellular Matrix, Perform Cell-Biological Functions, and Deliver Cargo

[0525] After determining whether cytoplasts could retain viability after cryopreservation, flow cytometry analysis were performed in order to determine whether the cell surface marker profile of MSC-derived cytoplasts differed from bone-marrow derived MSC. Both MSC-derived cytoplasts and bone-marrow derived MSCs maintained cell surface expression of CD45, CD90, CD44, CD146, and CD166. Cytoplasts attached, reorganized the cytoskeleton, spread on matrix proteins in 2D and 3D culture systems, and formed tunneling nanotubes, which can transfer bioproducts between cells of the same or different origin. Organelle-staining indicated that Golgi, ER, F-actin cytoskeleton, lysosomes, endosomes, microtubules, and mitochondria remain intact in cytoplasts. Furthermore, cytoplasts exhibited homing potential in vitro. Cytoplasts readily migrated on extracellular matrix proteins and migrated directionally towards soluble chemokine gradients (via chemosensing). Notably, cytoplasts transfected exogenously with purified mRNAs produced functional intracellular proteins, which could mimic therapeutic mRNA applications being developed for a variety of clinical uses and disease-states. This also demonstrates that the machineries for mRNA translation and protein synthesis operate normally in cytoplasts in the absence of a nucleus, and thus can be used to produce bioactive molecules with therapeutic value.

[0526] Cytoplasts transfected exogenously with purified mRNA encoding known secreted proteins produce functional extracellular proteins in conditioned culture media, indicating that the ER/Golgi and secretory pathways operate normally in cytoplasts in the absence of a nucleus. In addition, treatment of macrophages and endothelial cells with cytoplast-conditioned media containing secreted proteins activated key signal transduction responses in these cells. This provided a proof of concept that cytoplasts could be used as novel vehicles to produce and deliver secreted proteins and biomolecules with therapeutic value. Cytoplasts can be loaded with various cargo including, but not limited to, siRNA, shRNA, mRNA, DNA plasmids, peptides, and chemotherapeutic agents.

### Example 6

### Engineered Cytoplasts Can Express Functional Cell Surface Proteins

[0527] Engineered MSCs expressing CXCR4 and engineered MSC-derived cytoplasts expressing CXCR4 express comparable levels of CXCR4, as determined by flow cytometry. To determine whether engineered cytoplasts can express functional cell surface proteins, MSCs and MSC-derived cytoplasts expressing CXCR4 receptors were allowed to migrate towards various concentrations of SDF-1α. MSC-derived cytoplasts engineered to express functional CXCR4 can migrate towards SDF-1α, and cell migration increases with increasing concentrations of SDF-1α. Furthermore, the number of migrating MSC-derived cytoplasts was greater than the number of migrating MSCs expressing CXCR4.

[0528] MSC-derived cytoplasts can be engineered to express functional cell adhesion proteins known to mediate cell adhesion to the inflamed vasculature. MSC-derived cytoplasts can be engineered to express cell proteins known to modulate macrophage interactions and phagocytosis of therapeutic cells.

### Example 7

### Engineered Cytoplasts can Function Both In Vitro and In Vivo

[0529] Without wishing to be bound by theory, the examples show that cytoplasts that have been engineered to express a “cargo”, e.g., an exogenous mRNA molecule, can be produced. FIG. 7B and FIG. 7C show that MSC-derived cytoplasts can be engineered to produce and secrete therapeutic levels of a functional anti-inflammatory cytokine interleukin 10 (IL-10) in vitro and in a preclinical mouse model following intravenous injection. FIG. 7B shows that cytoplasts transfected with IL-10 mRNA can secrete high levels of IL-10. To determine whether the secreted IL-10 is active, serum-starved macrophages were incubated with conditioned medium (CM) from untreated MSCs, MSCs expressing IL-10, untreated cytoplasts, and cytoplasts expressing IL-10. Phosphorylated STAT3 was detected in macrophages following incubation with CM from MSCs expressing IL-10 and following incubation with CM from cytoplasts expressing IL-10, whereas no STAT3 activity was detected in macrophages following incubation with CM from untreated MSCs and untreated cytoplasts (FIG. 7C). To determine whether cytoplast-secreted IL-10 can be detected in vivo, C57B1/6 mice were injected retro-orbitally with MSC or MSC-derived cytoplasts expressing IL-10. Two hours post-injection, blood was collected and the levels of IL-10 were determined. Little to no IL-10 was detected in the blood of mice that were injected with untreated MSC (FIG. 7D). As shown in FIG. 7D, higher levels of IL-10 were detected in mice injected with MSC-derived cytoplasts expressing IL-10 as compared to the level in mice injected with untreated MSC.

[0530] These data illustrate the potential of genetically engineered cytoplast-based cell therapies to produce and secrete clinically-relevant therapeutic cytokines to treat normal and diseased tissues.

[0531] To determine whether MSC-derived cytoplasts can invade through the basement membrane, MSC or MSC-derived cytoplasts were allowed to invade through the basement membrane towards 10% FBS for 24 hours. As shown in FIG. 8A and FIG. 8B, MSC-derived cytoplasts were just was efficient at invading the basement membrane as untreated MSCs in the presence of 10% FBS. Noteworthy, while untreated MSCs were able to invade the basement membrane in the absence of a chemoattractant, MSC-treated cytoplasts were far less able to invade the basement membrane in the absence of a chemoattractant. These data illustrate that MSC-derived cytoplasts can digest and invade through the basement membrane. These data illustrate the innate potential of cytoplast-based cell therapies to penetrate and migrate through complex extracellular matrix barriers to deliver their cargo(s) within tissues.

[0532] As shown in FIG. 9A and FIG. 9B, MSC-derived cytoplasts have an average diameter of 12 μm, while MSC have an average diameter of 20 μm. To determine the biodistribution of MSC-derived cytoplasts, mice were retro-orbitally injected with MSC or MSC-derived cytoplasts. As shown in FIG. 9C and FIG. 9D, more MSC-derived cytoplasts were detected in the liver than the number of MSC detected in the liver. These data illustrate the potential of cytoplast-based cell therapies to be delivered directly to the circulation to treat a wide range of diseases.

### Example 8

### Exemplary Methods for Generating Cytoplasts

[0533] Enucleation of Mesenchymal Stem Cells (MSC)

[0534] This protocol was modified from Methods in Cell Biology Volume 14, 1976, Pages 87-93 Chapter 7 Enucleation of Mammalian Cells in Suspension (Michael H. Wigler, Alfred I. Neugut, I. Bernard Weinstein).

[0535] Preparation of 50% Ficoll solution: In a glass beaker shielded from light, grams of Ficoll (PM400, GE Healthcare 17-0300-500) were dissolved in an equivalent number of milliliters ultrapure water (Invitrogen 10977-015) by continual magnetic stirring for 24 hours at room temperature. The mixture was then autoclaved for 30 minutes. Once the mixture was cooled, it was stirred again to ensure uniform consistency. The refractive index was measured on a refractometer (Reichert 13940000), and was in the range of 1.4230-1.4290. Aliquots were stored at −20 degrees Celsius.

[0536] Preparation of 2× MEM: For each 50 ml quantity, 10 mL 10× MEM (Gibco, 11430-030), 2.94mL exactly Sodium Bicarbonate (7.5%, Gibco, 25080-094), 1 mL 100× Pen-Strep (Gibco 15140-122) and 36 mL ultrapure water (Invitrogen 10977-015) was used. The solution was then filtered through 0.22 um membrane flask (Olympus 25-227) and stored at 4 degrees Celsius.

[0537] On the day before enucleation, MSCs were seeded at 2.5 M per 15 cm plate (Olympus 25-203) in 20 mL MSC medium [MEM 1× (Gibco 12561-056); 16.5% premium FBS (Atlanta Biologics S1150); 1% HEPES 1M (Gibco 15630−80); 1% Anti-Anti 100× (Gibco 15240-062); 1% Glutamax 100X (Gibco 35050-061)]. Next, Cytochalasin B (Sigma Aldrich C6762) was added to the 2× MEM (2 μM/mL final concentration).

[0538] Preparation of Ficoll gradients: 2× CytoB was added to 50% Ficoll aliquots at 1:1 dilution to make 25% Ficoll stock concentration. Next, 17%, 16%, 15% and 12.5% Ficoll were made by diluting 25% Ficoll with the appropriate volume of 1× MEM buffer (2× MEM containing Cytochalasin B added to ultrapure water at 1:1 dilution). The dilutions were equilibrated in a CO₂ incubator for at least 1 hour covered with loose cap. The Ficoll gradients were then poured into 13.2mL ultra-clear tubes (Beckman, 344059), and incubated overnight (6-18 hours) in the CO₂ incubator.

[0539] On the day of enucleation, 12-25M MSC (ideally 20M) were collected into each tube for enucleation. Media was aspirated, and the cells washed once with phosphate buffered saline (PBS) (GIBCO 14190-144). Five mL of TrypLE-Select (Gibco, 12563011) was added to each plate, and incubated up to 5 minutes. When 90% of the cells were detached, 5 mL full MSC media was added, and the cells were collected into 50 ml tubes (3-4 plates/tube). The tubes were then centrifuged at 1, 200 rpm for 5 minutes. The pellet was resuspended in 10 mL PBS. Cells were counted, pelleted, and re-suspended with 12.5% Ficoll. Next, the cell-Ficoll mixture was dropwise passed through a 40 um cell strainer (Falcon 352340) into a new 50 mL tube. Using a syringe, 3.2 mL of cell suspension was slowly loaded onto the pre-made gradients. One mL of 1× MEM buffer was added at the final (top) layer with syringe. The tubes were then loaded into rotor buckets, balanced, and run in the ultracentrifuge (Beckman, L8M) for 60 minutes, 26,000 rpm, 31° C., Accel 7, Deccel 7. At the end of the centrifugation, there were three layers: one near the top of the 12.5% (cytoplasts and debris), one near the 12.5/15% interface (cytoplasts), and a pellet at the bottom of the 25% (karyoplasts). The layers above 15% Ficoll solution were collected into 15 ml conical tubes. The collected layers are then diluted with more than 4 volumes warm serum-free MSC medium (i.e. 3 mL of Ficoll and filled with up to 15 mL media). After gently mixing, the mixture was pelleted for 10 minutes at 1,200 rpm. Following three washes with warm serum-free MSC medium, the cells were resuspended in media according to the experimental protocol, e.g., transfection media vs. migration media vs. serum free media vs. full media. Efficiency of enucleation was determined in a 12-well plate by adding full MSC media with 1:2000 dilution Vybrant® Dyecycle™ Green (Molecular Probes V35004) or 1:5000 dilution Hoechst 33342. A small volume of each layer was added to each well and allowed to attach/stain for 10 minutes in the incubator. The percentage of negative cytoplasts per population was determined by epifluorescent microscopy.

### Cytoplast MRNA Transfection

[0540] 1 M cytoplasts were suspended with warm 1 ml amino acid-free α-MEM full medium (ThermoFisher 12561056; 16.5% Premium fetal bovine serum (FBS), 1% Glutamax (Gibco 35050061), 1% HEPES (Gibco 15630080)). 1 μg mRNA was diluted with warm opti-MEM and mixed with pipet at least 20 times. 4 μl lipofectamine-3000 (ThermoFisher L300015) was added to 46 μl warm opti-MEM (ThermoFisher 31985062) and mixed with pipet for at least 20 times. The ratio of mRNA and lipofectamine-3000 was 1:4 (w/v). The mRNA and lipofectamine-3000 dilutions were mixed with pipet for at least 20 times and incubated at room temperature for 15 minutes. The mRNA and lipofectamine-3000 mixture was added to the cytoplast suspension, mixed well and incubated at 37° C. for 30 minutes. The suspension was shaken every 5 minutes to prevent cell clumping. After incubation, the cells were centrifuged, and re-suspended in normal α-MEM full medium (16.5% Premium FBS, 1% Antibiotic-Antimycotic, 1% Glutamax, 1% HEPES) or PBS.

### Cytoplast SiRNA Transfection

[0541] 1 M cytoplasts were suspended with warm 1 ml A/A free α-MEM full medium (16.5% Premium FBS, 1% Glutamax, 1% HEPES). Two μl siRNA was diluted with warm opti-MEM and mixed with pipet at least 20 times. Eight μl lipofectamine-3000 was diluted with 92 μl warm opti-MEM and mixed with pipet at least 20 times. The ratio of siRNA and lipofectamine-3000 was 1:4 (v/v). The siRNA and lipofectamine-3000 dilutions were mixed with pipet at least 20 times and incubated at room temperature for 15 minutes. The siRNA and lipofectamine-3000 mixture was added to the cytoplast suspension, mixed well and incubated at 37° C. for 20 minutes. The suspension was shaken every 5 minutes to prevent cell clumping. After a 20 minute incubation, the cells were centrifuged, and re-suspended with normal α-MEM full medium (16.5% Premium FBS, 1% Antibiotic-Antimycotic, 1% Glutamax, 1% HEPES).

### Generation of Oncolytic Virus Infected Cytoplasts

[0542] One day before enucleation (usually 18 hrs before enucleation), 2.5*10\hat{ }6 hTERT-MSCs were seeded on a 15-cm dish. Roughly two hours after seeding, the cells were washed once with PBS. Cells were then infected with oHSV-GFP (Imams OV3001) at different MOIs (0.05 or 0.5 for example) with 8 mL serum free opti-MEM. Next, cells were incubated at 37° C. for 2 hours with occasionally shaking. The virus inoculum was then discarded. 20 mL pre-warmed full culture medium (a-MEM, 16.5% Premium FBS, 1% Antibiotic-Antimycotic, 1% Glutamax, 1% HEPES) was added to each well. The cells were incubated at 37° C. until enucleation. FIG. 11 illustrates fluorescent images of introducing polypeptide (VSV-GFP) directly into the parent or reference cell (cell without a nucleus) and into the enucleated cell described herein. FIG. 12 illustrates infecting MSCs with oncolytic Herpes Simplex Virus (oHSV) encoding GFP antigen. FIG. 12C illustrates increased delivery of the cargo (e.g. GFP reporter) to the target cancer cell by the enucleated MSCs. FIG. 12D illustrates increased recruitment of immune cells (e.g., CD8+ effector T cells) to the target cancer cell contacted by the enucleated MSCs described herein.

### Lentivirus Overexpressing Functional Proteins in Cytoplasts

[0543] Target cells were plated in one well of 6-well plate at density of 1-2×10⁵ cells/well, or 10 cm plate with 0.5-1 M MSCs. The next day, the concentrated recombinant lentivirus was thawed in a 37° C. water bath and removed from the bath immediately once thawed. The cells were then washed with PBS 3 times. 200 μL serum free medium or 2 mL serum free medium (1:1250 SureENTRY) was added. The target cells were infected in a 6-well plate with MOI 10:1. The next day, the viral supernatant was removed and the appropriate complete growth medium was added to the cells. After 72 hours incubation, the cells were subcultured into 2×100 mm dishes. The appropriate amount of selection drug (i.e. puromycin) was added for stable cell-line generation. 10-15 days after selection, clones were picked for expansion and were screened for positive ones. The selected positive clones were expanded for enucleation. Engineered cytoplasts were prepared as outlined above. The target protein expression on cytoplasts was determined by ordinary biochemical methods or functional assays, e.g., fluorescent activated cell sorting (FACS), western blot, or Boyden chamber assay.

Peptide Loading into Cytoplasts

[0544] 1×10⁵/ml per well were plated onto a 4-chamber glass slide (LabTek II 4-chamber glass slide, 155383) in full MSC media [MEM 1× (Gibco 12561-056); 16.5% premium FBS (Atlanta Biologics S1150); 1% HEPES 1M (Gibco 15630-80); 1% Anti-Anti 100× (Gibco 15240-062); 1% Glutamax 100× (Gibco 35050-061)]. Cells were allowed to attach for at least 1 hour or overnight. Cells were then rinsed with PBS (Gibco 14190-144). Arg9(FAM) (SEQ ID NO: 1154) (10 mM, Anaspec, AS-61207) was diluted in full media to a total concentration of 1:100 (100 uM). Cytoplasts were then incubated for 1 to 2 hours, and rinsed 3 times with PBS. Hoechst 33342 (Invitrogen) was added at a 1:5000 dilution in full media for at least 10 minutes. Cells were then washed with PBS and imaged by epifluorescent microscopy. FIG. 13 illustrates the increased peptide uptake or loading of a polypeptide of interest when co-incubated with the Arg9.

### Example 9

### Cytoplasts Show Better Biodistribution In Vivo

[0545] MSCs were cultured in 3D-hanging drops (3D MSCs) then enucleated to generate 3D cytoplasts. The 3D culture protocol of MSC by hanging drops is modified from Curr Protoc Stem Cell Biol. 2014 Feb. 6; 28: Unit-2B.6.(Thomas J. Bartoshl and Joni H. Ylostalo).

[0546] Healthy MSCs were harvested from 2D-cultured plates by Trypsin and resuspended in fresh α-MEM (ThermoFisher 12561056) full medium (16.5% Premium FBS, 1% Antibiotic-Antimycotic, 1% Glutamax, 1% HEPES) at 1.43 million cells/ml. The lid of a 15 cm plate was opened completely and 20 ml PBS was added to the plate. A multichannel pipette was used to make droplets on the lid of the plate at 35 μl per droplet (approx. 50,000 cells/droplet). About 100-120 droplets were placed on each lid. The lid was closed and the plate was placed back into the incubator. Droplets were cultured for 2 days, then harvested by cell lifter and collected into 15 ml tubes (approx. 300 droplets per tube). The tubes were centrifuged for 5 minutes at 1,200 rpm. The supernatant was removed and the tubes were washed twice with PBS. All P BS was then removed and 7.5 ml of freshly thawed 0.25% Trypsin-EDTA (ThermoFisher 25200114) was added to each tube. The tubes were incubated in a water bath for 4 minutes. The droplets were gently pipetted with 1 ml pipettes with low-retention tips about 10-20 times and incubated in the water bath for another 4 minutes. The droplets were again gently pipetted with 1 ml pipettes with low-retention tips about 10-20 times until most of the droplets were dissociated. 7.5 ml of full serum medium (GlutaMAX Supplement (Gibco 35050061); Fetal Bovine Serum-Premium Select (Atlanta Biologicals S11550); HEPES (1 M) (Gibco 15630080); antibiotic-Antimycotic (100×) (Gibco 15240062)) was added to each tube and the tubes were centrifuged for 10 minutes at 1,200 rpm. The dissociated cells were washed with 10 ml of full serum medium and the cells were resuspended with 5m1 full serum medium. The cells were passed through a 70 μm cell filter and then the filter was washed with 5 ml full serum medium. The cells were counted and resuspended with pre-treated 12.5% Ficoll at more than 10M/ml. 30-40M cells were used for each enucleation tube. Subsequently, the protocol for enucleation described above was followed.

[0547] DiD labeled normal 2D-cultured MSCs (2D MSC), 3D MSCs or 3D cytoplasts were retro-orbitally injected into BalB/C mice respectively. Indicated tissues were harvested 24 hours after injection and DiD labeled cells analyzed by FACS. FIG. 10A-10C show the successful generation of 3D-derived cytoplasts from 3D-cultured MSCs and also shows the 3D-derived cytoplasts have less lung trapping and better biodistribution to peripheral organs than 2D-cultured cells after injection into the circulation. This is expected to greatly improve their therapeutic ability to locate and deliver cargo to tissues.

### Example 10

### Methods of Treating a Disease Caused by An Infection

[0548] A patient infected with SARS-CoV-2 begins experiencing symptoms of Coronavirus disease 2019 (COVID-19). Respiratory symptoms of COVID-19 include shortness of breath and/or difficulty breathing.

[0549] The patient is administered a pharmaceutical formulation containing the cytoplasts described herein expressing an agonist of interleukin 10 (IL-10), or a portion thereof that is sufficient to treat the respiratory symptoms of the COVID-19 in the subject. In this example, the cytoplasts also expresses homing receptors that target the lymph tissue to enable efficient homing of the cytoplasts to the lymphatic system. The cytoplasts also expresses immune-evading moieties, such as a “don't eat me” signally peptide to ensure the cytoplasts are not cleared from the subject before reaching the lymphatic system. Following administration, the respiratory symptoms of the subject are reduced following administration.

### Example 11

### Generation of Oncolytic Virus Infected Cytoplasts

[0550] One day before enucleation (usually 18 hrs before enucleation), 2.5*10\hat{ }6 hTERT-MSCs were seeded on a 15-cm dish. Roughly two hours after seeding, the cells were washed once with PBS. Cells were then infected with oHSV-GFP (Imams OV3001) at different MOIs (0.05 or 0.5 for example) with 8 mL serum free opti-MEM. Next, cells were incubated at 37° C. for 2 hours with occasionally shaking. The virus inoculum was then discarded. 20 mL pre-warmed full culture medium (α-MEM, 16.5% Premium FBS, 1% Antibiotic-Antimycotic, 1% Glutamax, 1% HEPES) was added to each well. The cells were incubated at 37° C. until enucleation. FIG. 11A-11B illustrates fluorescent images of introducing polypeptide (VSV-GFP) directly into the parent or reference cell (cell without a nucleus) and into the enucleated cell described herein. Epifluorescent microscopy images of nucleated parental MSCs (top) and MSC-derived cell without nucleus (bottom) infected with VSV-GFP (arrow) at MOI 0.05 at 12 hrs after infection illustrated the introduction of a reporter peptide, GFP, into the MSC. The GFP antigen was clearly and robustly expressed by MSCs without nuclei indicating viral replication and antigen production in enucleated cells. Scale bar=50 μm. FIG. 11B illustrates high magnification epifluorescent image of an MSC-derived cell without nucleus infected with VSV-GFP (arrowheads) at MOI 0.1 at 12 hours after infection. The enucleated cell was also stained for F-actin filaments using rhodamine phalloidin (arrows) and the nuclear stain DAPI to illustrate the lack of the nucleus. FIG. 11 illustrates that cytoplasts can be engineered and transfected with oncolytic virus to express exogenous peptide such as antigenic peptide. FIG. 11 also illustrates that cytoplasts can be infected by virus for viral-trapping purpose.

### Example 12

### Recruitment and Activation of Immune Response to Target Cells Contacted by Cytoplasts

[0551] One day before enucleation (usually 18 hrs before enucleation), 2.5*10\hat{ }6 hTERT-MSCs were seeded on a 15-cm dish. Roughly two hours after seeding, the cells were washed once with PBS. Cells were then infected with oHSV-GFP (Imanis OV3001) at different MOIs (0.05 or 0.5 for example) with 8 mL serum free opti-MEM. Next, cells were incubated at 37° C. for 2 hours with occasionally shaking. The virus inoculum was then discarded. 20 mL pre-warmed full culture medium (α-MEM, 16.5% Premium FBS, 1% Antibiotic-Antimycotic, 1% Glutamax, 1% HEPES) was added to each well. The cells were incubated at 37° C. until enucleation. FIG. 12A-12BD illustrates infecting MSCs with oncolytic Herpes Simplex Virus (oHSV) encoding GFP antigen. Epifluorescent microscopy images of MSC and MSC without nucleus illustrate infection with oHSV encoding GFP antigen at MOI 0.05 at 48 hrs after infection. MSCs without nuclei were generated from MSCs 18 hrs after inoculation with oHSV-GFP. Scale bar=50 μm. FIG. 12B illustrates MSCs or MSCs without nuclei expressing lifeact-RFP after infected with 0.05 MOI of the oncolytic herpes simplex virus encoding GFP (oHSV-GFP) then injected into established U87 glioblastoma tumors growing in Nude mice. Images were taken 7 days after the injection. Both MSCs and MSCs without nuclei delivered oHSV to tumor cells as indicated by the strong GFP signal. It was noted that very few MSCs without nuclei could be detected in the tumor after 7 days, whereas a large number of MSCs were present in the center (injection site) and at the outer edge of the growing tumor. FIG. 12C is a bar graph showing percentage of GFP-covered tumor area, which represents the portion of tumor cells infected by MSCs or MSCs without nuclei carrying the oHSV-GFP virus. FIG. 12D is a graph showing the increased ratio of CD8+ effector T cells present in established glioblastoma tumors treated with combination of IL-12 (adjuvant) engineered MSCs without nuclei and oHSV engineered MSCs without nuclei compared to PBS injected controls. FIG. 12 illustrates that the cytoplasts described herein can induce sufficient immune response by recruiting immune cells to the site of the engineered cytoplasts. In such scenario, the cytoplasts and any cargo encapsulated by the cytoplasts (e.g., the virus that is trapped inside the cytoplasts) would be subjected destruction by the recruited immune response.

### Example 13

### Peptide Loading into Cytoplasts

[0552] 1×10⁵/ml per well were plated onto a 4-chamber glass slide (LabTek II 4-chamber glass slide, 155383) in full MSC media [MEM 1× (Gibco 12561-056); 16.5% premium FBS (Atlanta Biologics S1150); 1% HEPES 1M (Gibco 15630-80); 1% Anti-Anti 100× (Gibco 15240-062); 1% Glutamax 100× (Gibco 35050-061)]. Cells were allowed to attach for at least 1 hour or overnight. Cells were then rinsed with PBS (Gibco 14190-144). Arg9(FAM) (SEQ ID NO: 1154) (10 mM, Anaspec, AS-61207) was diluted in full media to a total concentration of 1:100 (100 uM). Cytoplasts were then incubated for 1 to 2 hours, and rinsed 3 times with PBS. Hoechst 33342 (Invitrogen) was added at a 1:5000 dilution in full media for at least 10 minutes. Cells were then washed with PBS and imaged by epifluorescent microscopy. FIG. 13A-13B illustrates increased peptide uptake or loading of a polypeptide of interest when co-incubated with the Arg9. As shown in FIG. 13A, MSCs (left) and enucleated MSCs (right) illustrate MSCs incubated with 100 μM of the cell-permeable antigen peptide (Arg)9-FAM (6-Carboxyfluorescein, FAM-Arg-Arg-Arg-Arg-Arg-Arg-Arg-Arg-Arg-OH). Scale bar=50 μm. Arrows indicate Hoechst stained nuclei, arrowheads indicate positive (Arg)9-FAM. FIG. 13B illustrates bar graphs represents relative fluorescence intensity measured in ImageJ. Corrected Total Cell Fluorescence=Integrated Density−(Area of selected cell X Mean fluorescence of background readings). Mean±SEM; n=10. Overall, FIG. 13 illustrates that the cytoplasts described herein (e.g., the MSCs without nuclei) can be directly loaded with a polypeptide of interest. For example, an antigen can be introduced into the cytoplasts by co-incubation of the antigen and the Arg9(FAM) with the cytoplasts. These cytoplasts can then function as the vaccine described herein.

[0553] While preferred embodiments of the present invention have been shown and described herein, it will be obvious to those skilled in the art that such embodiments are provided by way of example only. Numerous variations, changes, and substitutions will now occur to those skilled in the art without departing from the invention. It should be understood that various alternatives to the embodiments of the invention described herein may be employed in practicing the invention. It is intended that the following claims define the scope of the invention and that methods and structures within the scope of these claims and their equivalents be covered thereby.

The application's sequence listing, which the Patent Office published only in electronic form, follows.

SEQUENCE LISTING (1154 sequences)

SEQ ID NO: 1 - DNA, 4968 bp, Severe acute respiratory syndrome coronavirus 2
  source 1..4968: mol_type = unassigned DNA
ttgattggtgattgtgcaactgtacatacagctaataaatgggatctcattattagtgatatgtacgaccctaagactaaaaatgttacaaaagaaaatgactctaaagagggttttttcacttacatttgtgggtttatacaacaaaagctagctcttggaggttccgtggctataaagataacagaacattcttggaatgctgatctttataagctcatgggacacttcgcatggtggacagcctttgttactaatgtgaatgcgtcatcatctgaagcatttttaattggatgtaattatcttggcaaaccacgcgaacaaatagatggttatgtcatgcatgcaaattacatattttggaggaatacaaatccaattcagttgtcttcctattctttatttgacatgagtaaatttccccttaaattaaggggtactgctgttatgtctttaaaagaaggtcaaatcaatgatatgattttatctcttcttagtaaaggtagacttataattagagaaaacaacagagttgttatttctagtgatgttcttgttaacaactaaacgaacaatgtttgtttttcttgttttattgccactagtctctagtcagtgtgttaatcttacaaccagaactcaattaccccctgcatacactaattctttcacacgtggtgtttattaccctgacaaagttttcagatcctcagttttacattcaactcaggacttgttcttacctttcttttccaatgttacttggttccatgctatacatgtctctgggaccaatggtactaagaggtttgataaccctgtcctaccatttaatgatggtgtttattttgcttccactgagaagtctaacataataagaggctggatttttggtactactttagattcgaagacccagtccctacttattgttaataacgctactaatgttgttattaaagtctgtgaatttcaattttgtaatgatccatttttgggtgtttattaccacaaaaacaacaaaagttggatggaaagtgagttcagagtttattctagtgcgaataattgcacttttgaatatgtctctcagccttttcttatggaccttgaaggaaaacagggtaatttcaaaaatcttagggaatttgtgtttaagaatattgatggttattttaaaatatattctaagcacacgcctattaatttagtgcgtgatctccctcagggtttttcggctttagaaccattggtagatttgccaataggtattaacatcactaggtttcaaactttacttgctttacatagaagttatttgactcctggtgattcttcttcaggttggacagctggtgctgcagcttattatgtgggttatcttcaacctaggacttttctattaaaatataatgaaaatggaaccattacagatgctgtagactgtgcacttgaccctctctcagaaacaaagtgtacgttgaaatccttcactgtagaaaaaggaatctatcaaacttctaactttagagtccaaccaacagaatctattgttagatttcctaatattacaaacttgtgcccttttggtgaagtttttaacgccaccagatttgcatctgtttatgcttggaacaggaagagaatcagcaactgtgttgctgattattctgtcctatataattccgcatcattttccacttttaagtgttatggagtgtctcctactaaattaaatgatctctgctttactaatgtctatgcagattcatttgtaattagaggtgatgaagtcagacaaatcgctccagggcaaactggaaagattgctgattataattataaattaccagatgattttacaggctgcgttatagcttggaattctaacaatcttgattctaaggttggtggtaattataattacctgtatagattgtttaggaagtctaatctcaaaccttttgagagagatatttcaactgaaatctatcaggccggtagcacaccttgtaatggtgttgaaggttttaattgttactttcctttacaatcatatggtttccaacccactaatggtgttggttaccaaccatacagagtagtagtactttcttttgaacttctacatgcaccagcaactgtttgtggacctaaaaagtctactaatttggttaaaaacaaatgtgtcaatttcaacttcaatggtttaacaggcacaggtgttcttactgagtctaacaaaaagtttctgcctttccaacaatttggcagagacattgctgacactactgatgctgtccgtgatccacagacacttgagattcttgacattacaccatgttcttttggtggtgtcagtgttataacaccaggaacaaatacttctaaccaggttgctgttctttatcaggatgttaactgcacagaagtccctgttgctattcatgcagatcaacttactcctacttggcgtgtttattctacaggttctaatgtttttcaaacacgtgcaggctgtttaataggggctgaacatgtcaacaactcatatgagtgtgacatacccattggtgcaggtatatgcgctagttatcagactcagactaattctcctcggcgggcacgtagtgtagctagtcaatccatcattgcctacactatgtcacttggtgcagaaaattcagttgcttactctaataactctattgccatacccacaaattttactattagtgttaccacagaaattctaccagtgtctatgaccaagacatcagtagattgtacaatgtacatttgtggtgattcaactgaatgcagcaatcttttgttgcaatatggcagtttttgtacacaattaaaccgtgctttaactggaatagctgttgaacaagacaaaaacacccaagaagtttttgcacaagtcaaacaaatttacaaaacaccaccaattaaagattttggtggttttaatttttcacaaatattaccagatccatcaaaaccaagcaagaggtcatttattgaagatctacttttcaacaaagtgacacttgcagatgctggcttcatcaaacaatatggtgattgccttggtgatattgctgctagagacctcatttgtgcacaaaagtttaacggccttactgttttgccacctttgctcacagatgaaatgattgctcaatacacttctgcactgttagcgggtacaatcacttctggttggacctttggtgcaggtgctgcattacaaataccatttgctatgcaaatggcttataggtttaatggtattggagttacacagaatgttctctatgagaaccaaaaattgattgccaaccaatttaatagtgctattggcaaaattcaagactcactttcttccacagcaagtgcacttggaaaacttcaagatgtggtcaaccaaaatgcacaagctttaaacacgcttgttaaacaacttagctccaattttggtgcaatttcaagtgttttaaatgatatcctttcacgtcttgacaaagttgaggctgaagtgcaaattgataggttgatcacaggcagacttcaaagtttgcagacatatgtgactcaacaattaattagagctgcagaaatcagagcttctgctaatcttgctgctactaaaatgtcagagtgtgtacttggacaatcaaaaagagttgatttttgtggaaagggctatcatcttatgtccttccctcagtcagcacctcatggtgtagtcttcttgcatgtgacttatgtccctgcacaagaaaagaacttcacaactgctcctgccatttgtcatgatggaaaagcacactttcctcgtgaaggtgtctttgtttcaaatggcacacactggtttgtaacacaaaggaatttttatgaaccacaaatcattactacagacaacacatttgtgtctggtaactgtgatgttgtaataggaattgtcaacaacacagtttatgatcctttgcaacctgaattagactcattcaaggaggagttagataaatattttaagaatcatacatcaccagatgttgatttaggtgacatctctggcattaatgcttcagttgtaaacattcaaaaagaaattgaccgcctcaatgaggttgccaagaatttaaatgaatctctcatcgatctccaagaacttggaaagtatgagcagtatataaaatggccatggtacatttggctaggttttatagctggcttgattgccatagtaatggtgacaattatgctttgctgtatgaccagttgctgtagttgtctcaagggctgttgttcttgtggatcctgctgcaaatttgatgaagacgactctgagccagtgctcaaaggagtcaaattacattacacataaacgaacttatggatttgtttatgagaatcttcacaattggaactgtaactttgaagcaaggtgaaatcaaggatgctactccttcagattttgttcgcgctactgcaacgataccgatacaagcctcactccctttcggatggcttattgttggcgttgcacttcttgctgtttttcagagcgcttccaaaatcataaccctcaaaaagagatggcaactagcactctccaagggtgttcactttgtttgcaacttgctgttgttgtttgtaacagtttactcacaccttttgctcgttgctgctggccttgaagccccttttctctatctttatgctttagtctacttcttgcagagtataaactttgtaagaataataatgaggctttggctttgctggaaatgccgttccaaaaacccattactttatgatgccaactattttctttgctggcatactaattgttacgactattgtataccttacaatagtgtaacttcttcaattgtcattacttcaggtgatggcacaacaagtcctatttctgaacatgactaccagattggtggt

SEQ ID NO: 2 - protein, 1273 aa, Severe acute respiratory syndrome coronavirus 2
MFVFLVLLPLVSSQCVNLTTRTQLPPAYTNSFTRGVYYPDKVFRSSVLHSTQDLFLPFFSNVTWFHAIHVSGTNGTKRFDNPVLPFNDGVYFASTEKSNIIRGWIFGTTLDSKTQSLLIVNNATNVVIKVCEFQFCNDPFLGVYYHKNNKSWMESEFRVYSSANNCTFEYVSQPFLMDLEGKQGNFKNLREFVFKNIDGYFKIYSKHTPINLVRDLPQGFSALEPLVDLPIGINITRFQTLLALHRSYLTPGDSSSGWTAGAAAYYVGYLQPRTFLLKYNENGTITDAVDCALDPLSETKCTLKSFTVEKGIYQTSNFRVQPTESIVRFPNITNLCPFGEVFNATRFASVYAWNRKRISNCVADYSVLYNSASFSTFKCYGVSPTKLNDLCFTNVYADSFVIRGDEVRQIAPGQTGKIADYNYKLPDDFTGCVIAWNSNNLDSKVGGNYNYLYRLFRKSNLKPFERDISTEIYQAGSTPCNGVEGFNCYFPLQSYGFQPTNGVGYQPYRVVVLSFELLHAPATVCGPKKSTNLVKNKCVNFNFNGLTGTGVLTESNKKFLPFQQFGRDIADTTDAVRDPQTLEILDITPCSFGGVSVITPGTNTSNQVAVLYQDVNCTEVPVAIHADQLTPTWRVYSTGSNVFQTRAGCLIGAEHVNNSYECDIPIGAGICASYQTQTNSPRRARSVASQSIIAYTMSLGAENSVAYSNNSIAIPTNFTISVTTEILPVSMTKTSVDCTMYICGDSTECSNLLLQYGSFCTQLNRALTGIAVEQDKNTQEVFAQVKQIYKTPPIKDFGGFNFSQILPDPSKPSKRSFIEDLLFNKVTLADAGFIKQYGDCLGDIAARDLICAQKFNGLTVLPPLLTDEMIAQYTSALLAGTITSGWTFGAGAALQIPFAMQMAYRFNGIGVTQNVLYENQKLIANQFNSAIGKIQDSLSSTASALGKLQDVVNQNAQALNTLVKQLSSNFGAISSVLNDILSRLDKVEAEVQIDRLITGRLQSLQTYVTQQLIRAAEIRASANLAATKMSECVLGQSKRVDFCGKGYHLMSFPQSAPHGVVFLHVTYVPAQEKNFTTAPAICHDGKAHFPREGVFVSNGTHWFVTQRNFYEPQIITTDNTFVSGNCDVVIGIVNNTVYDPLQPELDSFKEELDKYFKNHTSPDVDLGDISGINASVVNIQKEIDRLNEVAKNLNESLIDLQELGKYEQYIKWPWYIWLGFIAGLIAIVMVTIMLCCMTSCCSCLKGCCSCGSCCKFDEDDSEPVLKGVKLHYT

SEQ ID NO: 3 - DNA, 3822 bp, Severe acute respiratory syndrome coronavirus 2
  source 1..3822: mol_type = unassigned DNA
atgtttgtttttcttgttttattgccactagtctctagtcagtgtgttaatcttacaaccagaactcaattaccccctgcatacactaattctttcacacgtggtgtttattaccctgacaaagttttcagatcctcagttttacattcaactcaggacttgttcttacctttcttttccaatgttacttggttccatgctatacatgtctctgggaccaatggtactaagaggtttgataaccctgtcctaccatttaatgatggtgtttattttgcttccactgagaagtctaacataataagaggctggatttttggtactactttagattcgaagacccagtccctacttattgttaataacgctactaatgttgttattaaagtctgtgaatttcaattttgtaatgatccatttttgggtgtttattaccacaaaaacaacaaaagttggatggaaagtgagttcagagtttattctagtgcgaataattgcacttttgaatatgtctctcagccttttcttatggaccttgaaggaaaacagggtaatttcaaaaatcttagggaatttgtgtttaagaatattgatggttattttaaaatatattctaagcacacgcctattaatttagtgcgtgatctccctcagggtttttcggctttagaaccattggtagatttgccaataggtattaacatcactaggtttcaaactttacttgctttacatagaagttatttgactcctggtgattcttcttcaggttggacagctggtgctgcagcttattatgtgggttatcttcaacctaggacttttctattaaaatataatgaaaatggaaccattacagatgctgtagactgtgcacttgaccctctctcagaaacaaagtgtacgttgaaatccttcactgtagaaaaaggaatctatcaaacttctaactttagagtccaaccaacagaatctattgttagatttcctaatattacaaacttgtgcccttttggtgaagtttttaacgccaccagatttgcatctgtttatgcttggaacaggaagagaatcagcaactgtgttgctgattattctgtcctatataattccgcatcattttccacttttaagtgttatggagtgtctcctactaaattaaatgatctctgctttactaatgtctatgcagattcatttgtaattagaggtgatgaagtcagacaaatcgctccagggcaaactggaaagattgctgattataattataaattaccagatgattttacaggctgcgttatagcttggaattctaacaatcttgattctaaggttggtggtaattataattacctgtatagattgtttaggaagtctaatctcaaaccttttgagagagatatttcaactgaaatctatcaggccggtagcacaccttgtaatggtgttgaaggttttaattgttactttcctttacaatcatatggtttccaacccactaatggtgttggttaccaaccatacagagtagtagtactttcttttgaacttctacatgcaccagcaactgtttgtggacctaaaaagtctactaatttggttaaaaacaaatgtgtcaatttcaacttcaatggtttaacaggcacaggtgttcttactgagtctaacaaaaagtttctgcctttccaacaatttggcagagacattgctgacactactgatgctgtccgtgatccacagacacttgagattcttgacattacaccatgttcttttggtggtgtcagtgttataacaccaggaacaaatacttctaaccaggttgctgttctttatcaggatgttaactgcacagaagtccctgttgctattcatgcagatcaacttactcctacttggcgtgtttattctacaggttctaatgtttttcaaacacgtgcaggctgtttaataggggctgaacatgtcaacaactcatatgagtgtgacatacccattggtgcaggtatatgcgctagttatcagactcagactaattctcctcggcgggcacgtagtgtagctagtcaatccatcattgcctacactatgtcacttggtgcagaaaattcagttgcttactctaataactctattgccatacccacaaattttactattagtgttaccacagaaattctaccagtgtctatgaccaagacatcagtagattgtacaatgtacatttgtggtgattcaactgaatgcagcaatcttttgttgcaatatggcagtttttgtacacaattaaaccgtgctttaactggaatagctgttgaacaagacaaaaacacccaagaagtttttgcacaagtcaaacaaatttacaaaacaccaccaattaaagattttggtggttttaatttttcacaaatattaccagatccatcaaaaccaagcaagaggtcatttattgaagatctacttttcaacaaagtgacacttgcagatgctggcttcatcaaacaatatggtgattgccttggtgatattgctgctagagacctcatttgtgcacaaaagtttaacggccttactgttttgccacctttgctcacagatgaaatgattgctcaatacacttctgcactgttagcgggtacaatcacttctggttggacctttggtgcaggtgctgcattacaaataccatttgctatgcaaatggcttataggtttaatggtattggagttacacagaatgttctctatgagaaccaaaaattgattgccaaccaatttaatagtgctattggcaaaattcaagactcactttcttccacagcaagtgcacttggaaaacttcaagatgtggtcaaccaaaatgcacaagctttaaacacgcttgttaaacaacttagctccaattttggtgcaatttcaagtgttttaaatgatatcctttcacgtcttgacaaagttgaggctgaagtgcaaattgataggttgatcacaggcagacttcaaagtttgcagacatatgtgactcaacaattaattagagctgcagaaatcagagcttctgctaatcttgctgctactaaaatgtcagagtgtgtacttggacaatcaaaaagagttgatttttgtggaaagggctatcatcttatgtccttccctcagtcagcacctcatggtgtagtcttcttgcatgtgacttatgtccctgcacaagaaaagaacttcacaactgctcctgccatttgtcatgatggaaaagcacactttcctcgtgaaggtgtctttgtttcaaatggcacacactggtttgtaacacaaaggaatttttatgaaccacaaatcattactacagacaacacatttgtgtctggtaactgtgatgttgtaataggaattgtcaacaacacagtttatgatcctttgcaacctgaattagactcattcaaggaggagttagataaatattttaagaatcatacatcaccagatgttgatttaggtgacatctctggcattaatgcttcagttgtaaacattcaaaaagaaattgaccgcctcaatgaggttgccaagaatttaaatgaatctctcatcgatctccaagaacttggaaagtatgagcagtatataaaatggccatggtacatttggctaggttttatagctggcttgattgccatagtaatggtgacaattatgctttgctgtatgaccagttgctgtagttgtctcaagggctgttgttcttgtggatcctgctgcaaatttgatgaagacgactctgagccagtgctcaaaggagtcaaattacattacacataa

SEQ ID NO: 4 - DNA, 29902 bp, Severe acute respiratory syndrome coronavirus 2
  source 1..29902: mol_type = unassigned DNA
attaaaggtttataccttcccaggtaacaaaccaaccaactttcgatctcttgtagatctgttctctaaacgaactttaaaatctgtgtggctgtcactcggctgcatgcttagtgcactcacgcagtataattaataactaattactgtcgttgacaggacacgagtaactcgtctatcttctgcaggctgcttacggtttcgtccgtgttgcagccgatcatcagcacatctaggtttcgtccgggtgtgaccgaaaggtaagatggagagccttgtccctggtttcaacgagaaaacacacgtccaactcagtttgcctgttttacaggttcgcgacgtgctcgtacgtggctttggagactccgtggaggaggtcttatcagaggcacgtcaacatcttaaagatggcacttgtggcttagtagaagttgaaaaaggcgttttgcctcaacttgaacagccctatgtgttcatcaaacgttcggatgctcgaactgcacctcatggtcatgttatggttgagctggtagcagaactcgaaggcattcagtacggtcgtagtggtgagacacttggtgtccttgtccctcatgtgggcgaaataccagtggcttaccgcaaggttcttcttcgtaagaacggtaataaaggagctggtggccatagttacggcgccgatctaaagtcatttgacttaggcgacgagcttggcactgatccttatgaagattttcaagaaaactggaacactaaacatagcagtggtgttacccgtgaactcatgcgtgagcttaacggaggggcatacactcgctatgtcgataacaacttctgtggccctgatggctaccctcttgagtgcattaaagaccttctagcacgtgctggtaaagcttcatgcactttgtccgaacaactggactttattgacactaagaggggtgtatactgctgccgtgaacatgagcatgaaattgcttggtacacggaacgttctgaaaagagctatgaattgcagacaccttttgaaattaaattggcaaagaaatttgacaccttcaatggggaatgtccaaattttgtatttcccttaaattccataatcaagactattcaaccaagggttgaaaagaaaaagcttgatggctttatgggtagaattcgatctgtctatccagttgcgtcaccaaatgaatgcaaccaaatgtgcctttcaactctcatgaagtgtgatcattgtggtgaaacttcatggcagacgggcgattttgttaaagccacttgcgaattttgtggcactgagaatttgactaaagaaggtgccactacttgtggttacttaccccaaaatgctgttgttaaaatttattgtccagcatgtcacaattcagaagtaggacctgagcatagtcttgccgaataccataatgaatctggcttgaaaaccattcttcgtaagggtggtcgcactattgcctttggaggctgtgtgttctcttatgttggttgccataacaagtgtgcctattgggttccacgtgctagcgctaacataggttgtaaccatacaggtgttgttggagaaggttccgaaggtcttaatgacaaccttcttgaaatactccaaaaagagaaagtcaacatcaatattgttggtgactttaaacttaatgaagagatcgccattattttggcatctttttctgcttccacaagtgcttttgtggaaactgtgaaaggtttggattataaagcattcaaacaaattgttgaatcctgtggtaattttaaagttacaaaaggaaaagctaaaaaaggtgcctggaatattggtgaacagaaatcaatactgagtcctctttatgcatttgcatcagaggctgctcgtgttgtacgatcaattttctcccgcactcttgaaactgctcaaaattctgtgcgtgttttacagaaggccgctataacaatactagatggaatttcacagtattcactgagactcattgatgctatgatgttcacatctgatttggctactaacaatctagttgtaatggcctacattacaggtggtgttgttcagttgacttcgcagtggctaactaacatctttggcactgtttatgaaaaactcaaacccgtccttgattggcttgaagagaagtttaaggaaggtgtagagtttcttagagacggttgggaaattgttaaatttatctcaacctgtgcttgtgaaattgtcggtggacaaattgtcacctgtgcaaaggaaattaaggagagtgttcagacattctttaagcttgtaaataaatttttggctttgtgtgctgactctatcattattggtggagctaaacttaaagccttgaatttaggtgaaacatttgtcacgcactcaaagggattgtacagaaagtgtgttaaatccagagaagaaactggcctactcatgcctctaaaagccccaaaagaaattatcttcttagagggagaaacacttcccacagaagtgttaacagaggaagttgtcttgaaaactggtgatttacaaccattagaacaacctactagtgaagctgttgaagctccattggttggtacaccagtttgtattaacgggcttatgttgctcgaaatcaaagacacagaaaagtactgtgcccttgcacctaatatgatggtaacaaacaataccttcacactcaaaggcggtgcaccaacaaaggttacttttggtgatgacactgtgatagaagtgcaaggttacaagagtgtgaatatcacttttgaacttgatgaaaggattgataaagtacttaatgagaagtgctctgcctatacagttgaactcggtacagaagtaaatgagttcgcctgtgttgtggcagatgctgtcataaaaactttgcaaccagtatctgaattacttacaccactgggcattgatttagatgagtggagtatggctacatactacttatttgatgagtctggtgagtttaaattggcttcacatatgtattgttctttctaccctccagatgaggatgaagaagaaggtgattgtgaagaagaagagtttgagccatcaactcaatatgagtatggtactgaagatgattaccaaggtaaacctttggaatttggtgccacttctgctgctcttcaacctgaagaagagcaagaagaagattggttagatgatgatagtcaacaaactgttggtcaacaagacggcagtgaggacaatcagacaactactattcaaacaattgttgaggttcaacctcaattagagatggaacttacaccagttgttcagactattgaagtgaatagttttagtggttatttaaaacttactgacaatgtatacattaaaaatgcagacattgtggaagaagctaaaaaggtaaaaccaacagtggttgttaatgcagccaatgtttaccttaaacatggaggaggtgttgcaggagccttaaataaggctactaacaatgccatgcaagttgaatctgatgattacatagctactaatggaccacttaaagtgggtggtagttgtgttttaagcggacacaatcttgctaaacactgtcttcatgttgtcggcccaaatgttaacaaaggtgaagacattcaacttcttaagagtgcttatgaaaattttaatcagcacgaagttctacttgcaccattattatcagctggtatttttggtgctgaccctatacattctttaagagtttgtgtagatactgttcgcacaaatgtctacttagctgtctttgataaaaatctctatgacaaacttgtttcaagctttttggaaatgaagagtgaaaagcaagttgaacaaaagatcgctgagattcctaaagaggaagttaagccatttataactgaaagtaaaccttcagttgaacagagaaaacaagatgataagaaaatcaaagcttgtgttgaagaagttacaacaactctggaagaaactaagttcctcacagaaaacttgttactttatattgacattaatggcaatcttcatccagattctgccactcttgttagtgacattgacatcactttcttaaagaaagatgctccatatatagtgggtgatgttgttcaagagggtgttttaactgctgtggttatacctactaaaaaggctggtggcactactgaaatgctagcgaaagctttgagaaaagtgccaacagacaattatataaccacttacccgggtcagggtttaaatggttacactgtagaggaggcaaagacagtgcttaaaaagtgtaaaagtgccttttacattctaccatctattatctctaatgagaagcaagaaattcttggaactgtttcttggaatttgcgagaaatgcttgcacatgcagaagaaacacgcaaattaatgcctgtctgtgtggaaactaaagccatagtttcaactatacagcgtaaatataagggtattaaaatacaagagggtgtggttgattatggtgctagattttacttttacaccagtaaaacaactgtagcgtcacttatcaacacacttaacgatctaaatgaaactcttgttacaatgccacttggctatgtaacacatggcttaaatttggaagaagctgctcggtatatgagatctctcaaagtgccagctacagtttctgtttcttcacctgatgctgttacagcgtataatggttatcttacttcttcttctaaaacacctgaagaacattttattgaaaccatctcacttgctggttcctataaagattggtcctattctggacaatctacacaactaggtatagaatttcttaagagaggtgataaaagtgtatattacactagtaatcctaccacattccacctagatggtgaagttatcacctttgacaatcttaagacacttctttctttgagagaagtgaggactattaaggtgtttacaacagtagacaacattaacctccacacgcaagttgtggacatgtcaatgacatatggacaacagtttggtccaacttatttggatggagctgatgttactaaaataaaacctcataattcacatgaaggtaaaacattttatgttttacctaatgatgacactctacgtgttgaggcttttgagtactaccacacaactgatcctagttttctgggtaggtacatgtcagcattaaatcacactaaaaagtggaaatacccacaagttaatggtttaacttctattaaatgggcagataacaactgttatcttgccactgcattgttaacactccaacaaatagagttgaagtttaatccacctgctctacaagatgcttattacagagcaagggctggtgaagctgctaacttttgtgcacttatcttagcctactgtaataagacagtaggtgagttaggtgatgttagagaaacaatgagttacttgtttcaacatgccaatttagattcttgcaaaagagtcttgaacgtggtgtgtaaaacttgtggacaacagcagacaacccttaagggtgtagaagctgttatgtacatgggcacactttcttatgaacaatttaagaaaggtgttcagataccttgtacgtgtggtaaacaagctacaaaatatctagtacaacaggagtcaccttttgttatgatgtcagcaccacctgctcagtatgaacttaagcatggtacatttacttgtgctagtgagtacactggtaattaccagtgtggtcactataaacatataacttctaaagaaactttgtattgcatagacggtgctttacttacaaagtcctcagaatacaaaggtcctattacggatgttttctacaaagaaaacagttacacaacaaccataaaaccagttacttataaattggatggtgttgtttgtacagaaattgaccctaagttggacaattattataagaaagacaattcttatttcacagagcaaccaattgatcttgtaccaaaccaaccatatccaaacgcaagcttcgataattttaagtttgtatgtgataatatcaaatttgctgatgatttaaaccagttaactggttataagaaacctgcttcaagagagcttaaagttacatttttccctgacttaaatggtgatgtggtggctattgattataaacactacacaccctcttttaagaaaggagctaaattgttacataaacctattgtttggcatgttaacaatgcaactaataaagccacgtataaaccaaatacctggtgtatacgttgtctttggagcacaaaaccagttgaaacatcaaattcgtttgatgtactgaagtcagaggacgcgcagggaatggataatcttgcctgcgaagatctaaaaccagtctctgaagaagtagtggaaaatcctaccatacagaaagacgttcttgagtgtaatgtgaaaactaccgaagttgtaggagacattatacttaaaccagcaaataatagtttaaaaattacagaagaggttggccacacagatctaatggctgcttatgtagacaattctagtcttactattaagaaacctaatgaattatctagagtattaggtttgaaaacccttgctactcatggtttagctgctgttaatagtgtcccttgggatactatagctaattatgctaagccttttcttaacaaagttgttagtacaactactaacatagttacacggtgtttaaaccgtgtttgtactaattatatgccttatttctttactttattgctacaattgtgtacttttactagaagtacaaattctagaattaaagcatctatgccgactactatagcaaagaatactgttaagagtgtcggtaaattttgtctagaggcttcatttaattatttgaagtcacctaatttttctaaactgataaatattataatttggtttttactattaagtgtttgcctaggttctttaatctactcaaccgctgctttaggtgttttaatgtctaatttaggcatgccttcttactgtactggttacagagaaggctatttgaactctactaatgtcactattgcaacctactgtactggttctataccttgtagtgtttgtcttagtggtttagattctttagacacctatccttctttagaaactatacaaattaccatttcatcttttaaatgggatttaactgcttttggcttagttgcagagtggtttttggcatatattcttttcactaggtttttctatgtacttggattggctgcaatcatgcaattgtttttcagctattttgcagtacattttattagtaattcttggcttatgtggttaataattaatcttgtacaaatggccccgatttcagctatggttagaatgtacatcttctttgcatcattttattatgtatggaaaagttatgtgcatgttgtagacggttgtaattcatcaacttgtatgatgtgttacaaacgtaatagagcaacaagagtcgaatgtacaactattgttaatggtgttagaaggtccttttatgtctatgctaatggaggtaaaggcttttgcaaactacacaattggaattgtgttaattgtgatacattctgtgctggtagtacatttattagtgatgaagttgcgagagacttgtcactacagtttaaaagaccaataaatcctactgaccagtcttcttacatcgttgatagtgttacagtgaagaatggttccatccatctttactttgataaagctggtcaaaagacttatgaaagacattctctctctcattttgttaacttagacaacctgagagctaataacactaaaggttcattgcctattaatgttatagtttttgatggtaaatcaaaatgtgaagaatcatctgcaaaatcagcgtctgtttactacagtcagcttatgtgtcaacctatactgttactagatcaggcattagtgtctgatgttggtgatagtgcggaagttgcagttaaaatgtttgatgcttacgttaatacgttttcatcaacttttaacgtaccaatggaaaaactcaaaacactagttgcaactgcagaagctgaacttgcaaagaatgtgtccttagacaatgtcttatctacttttatttcagcagctcggcaagggtttgttgattcagatgtagaaactaaagatgttgttgaatgtcttaaattgtcacatcaatctgacatagaagttactggcgatagttgtaataactatatgctcacctataacaaagttgaaaacatgacaccccgtgaccttggtgcttgtattgactgtagtgcgcgtcatattaatgcgcaggtagcaaaaagtcacaacattgctttgatatggaacgttaaagatttcatgtcattgtctgaacaactacgaaaacaaatacgtagtgctgctaaaaagaataacttaccttttaagttgacatgtgcaactactagacaagttgttaatgttgtaacaacaaagatagcacttaagggtggtaaaattgttaataattggttgaagcagttaattaaagttacacttgtgttcctttttgttgctgctattttctatttaataacacctgttcatgtcatgtctaaacatactgacttttcaagtgaaatcataggatacaaggctattgatggtggtgtcactcgtgacatagcatctacagatacttgttttgctaacaaacatgctgattttgacacatggtttagccagcgtggtggtagttatactaatgacaaagcttgcccattgattgctgcagtcataacaagagaagtgggttttgtcgtgcctggtttgcctggcacgatattacgcacaactaatggtgactttttgcatttcttacctagagtttttagtgcagttggtaacatctgttacacaccatcaaaacttatagagtacactgactttgcaacatcagcttgtgttttggctgctgaatgtacaatttttaaagatgcttctggtaagccagtaccatattgttatgataccaatgtactagaaggttctgttgcttatgaaagtttacgccctgacacacgttatgtgctcatggatggctctattattcaatttcctaacacctaccttgaaggttctgttagagtggtaacaacttttgattctgagtactgtaggcacggcacttgtgaaagatcagaagctggtgtttgtgtatctactagtggtagatgggtacttaacaatgattattacagatctttaccaggagttttctgtggtgtagatgctgtaaatttacttactaatatgtttacaccactaattcaacctattggtgctttggacatatcagcatctatagtagctggtggtattgtagctatcgtagtaacatgccttgcctactattttatgaggtttagaagagcttttggtgaatacagtcatgtagttgcctttaatactttactattccttatgtcattcactgtactctgtttaacaccagtttactcattcttacctggtgtttattctgttatttacttgtacttgacattttatcttactaatgatgtttcttttttagcacatattcagtggatggttatgttcacacctttagtacctttctggataacaattgcttatatcatttgtatttccacaaagcatttctattggttctttagtaattacctaaagagacgtgtagtctttaatggtgtttcctttagtacttttgaagaagctgcgctgtgcacctttttgttaaataaagaaatgtatctaaagttgcgtagtgatgtgctattacctcttacgcaatataatagatacttagctctttataataagtacaagtattttagtggagcaatggatacaactagctacagagaagctgcttgttgtcatctcgcaaaggctctcaatgacttcagtaactcaggttctgatgttctttaccaaccaccacaaacctctatcacctcagctgttttgcagagtggttttagaaaaatggcattcccatctggtaaagttgagggttgtatggtacaagtaacttgtggtacaactacacttaacggtctttggcttgatgacgtagtttactgtccaagacatgtgatctgcacctctgaagacatgcttaaccctaattatgaagatttactcattcgtaagtctaatcataatttcttggtacaggctggtaatgttcaactcagggttattggacattctatgcaaaattgtgtacttaagcttaaggttgatacagccaatcctaagacacctaagtataagtttgttcgcattcaaccaggacagactttttcagtgttagcttgttacaatggttcaccatctggtgtttaccaatgtgctatgaggcccaatttcactattaagggttcattccttaatggttcatgtggtagtgttggttttaacatagattatgactgtgtctctttttgttacatgcaccatatggaattaccaactggagttcatgctggcacagacttagaaggtaacttttatggaccttttgttgacaggcaaacagcacaagcagctggtacggacacaactattacagttaatgttttagcttggttgtacgctgctgttataaatggagacaggtggtttctcaatcgatttaccacaactcttaatgactttaaccttgtggctatgaagtacaattatgaacctctaacacaagaccatgttgacatactaggacctctttctgctcaaactggaattgccgttttagatatgtgtgcttcattaaaagaattactgcaaaatggtatgaatggacgtaccatattgggtagtgctttattagaagatgaatttacaccttttgatgttgttagacaatgctcaggtgttactttccaaagtgcagtgaaaagaacaatcaagggtacacaccactggttgttactcacaattttgacttcacttttagttttagtccagagtactcaatggtctttgttcttttttttgtatgaaaatgcctttttaccttttgctatgggtattattgctatgtctgcttttgcaatgatgtttgtcaaacataagcatgcatttctctgtttgtttttgttaccttctcttgccactgtagcttattttaatatggtctatatgcctgctagttgggtgatgcgtattatgacatggttggatatggttgatactagtttgtctggttttaagctaaaagactgtgttatgtatgcatcagctgtagtgttactaatccttatgacagcaagaactgtgtatgatgatggtgctaggagagtgtggacacttatgaatgtcttgacactcgtttataaagtttattatggtaatgctttagatcaagccatttccatgtgggctcttataatctctgttacttctaactactcaggtgtagttacaactgtcatgtttttggccagaggtattgtttttatgtgtgttgagtattgccctattttcttcataactggtaatacacttcagtgtataatgctagtttattgtttcttaggctatttttgtacttgttactttggcctcttttgtttactcaaccgctactttagactgactcttggtgtttatgattacttagtttctacacaggagtttagatatatgaattcacagggactactcccacccaagaatagcatagatgccttcaaactcaacattaaattgttgggtgttggtggcaaaccttgtatcaaagtagccactgtacagtctaaaatgtcagatgtaaagtgcacatcagtagtcttactctcagttttgcaacaactcagagtagaatcatcatctaaattgtgggctcaatgtgtccagttacacaatgacattctcttagctaaagatactactgaagcctttgaaaaaatggtttcactactttctgttttgctttccatgcagggtgctgtagacataaacaagctttgtgaagaaatgctggacaacagggcaaccttacaagctatagcctcagagtttagttcccttccatcatatgcagcttttgctactgctcaagaagcttatgagcaggctgttgctaatggtgattctgaagttgttcttaaaaagttgaagaagtctttgaatgtggctaaatctgaatttgaccgtgatgcagccatgcaacgtaagttggaaaagatggctgatcaagctatgacccaaatgtataaacaggctagatctgaggacaagagggcaaaagttactagtgctatgcagacaatgcttttcactatgcttagaaagttggataatgatgcactcaacaacattatcaacaatgcaagagatggttgtgttcccttgaacataatacctcttacaacagcagccaaactaatggttgtcataccagactataacacatataaaaatacgtgtgatggtacaacatttacttatgcatcagcattgtgggaaatccaacaggttgtagatgcagatagtaaaattgttcaacttagtgaaattagtatggacaattcacctaatttagcatggcctcttattgtaacagctttaagggccaattctgctgtcaaattacagaataatgagcttagtcctgttgcactacgacagatgtcttgtgctgccggtactacacaaactgcttgcactgatgacaatgcgttagcttactacaacacaacaaagggaggtaggtttgtacttgcactgttatccgatttacaggatttgaaatgggctagattccctaagagtgatggaactggtactatctatacagaactggaaccaccttgtaggtttgttacagacacacctaaaggtcctaaagtgaagtatttatactttattaaaggattaaacaacctaaatagaggtatggtacttggtagtttagctgccacagtacgtctacaagctggtaatgcaacagaagtgcctgccaattcaactgtattatctttctgtgcttttgctgtagatgctgctaaagcttacaaagattatctagctagtgggggacaaccaatcactaattgtgttaagatgttgtgtacacacactggtactggtcaggcaataacagttacaccggaagccaatatggatcaagaatcctttggtggtgcatcgtgttgtctgtactgccgttgccacatagatcatccaaatcctaaaggattttgtgacttaaaaggtaagtatgtacaaatacctacaacttgtgctaatgaccctgtgggttttacacttaaaaacacagtctgtaccgtctgcggtatgtggaaaggttatggctgtagttgtgatcaactccgcgaacccatgcttcagtcagctgatgcacaatcgtttttaaacgggtttgcggtgtaagtgcagcccgtcttacaccgtgcggcacaggcactagtactgatgtcgtatacagggcttttgacatctacaatgataaagtagctggttttgctaaattcctaaaaactaattgttgtcgcttccaagaaaaggacgaagatgacaatttaattgattcttactttgtagttaagagacacactttctctaactaccaacatgaagaaacaatttataatttacttaaggattgtccagctgttgctaaacatgacttctttaagtttagaatagacggtgacatggtaccacatatatcacgtcaacgtcttactaaatacacaatggcagacctcgtctatgctttaaggcattttgatgaaggtaattgtgacacattaaaagaaatacttgtcacatacaattgttgtgatgatgattatttcaataaaaaggactggtatgattttgtagaaaacccagatatattacgcgtatacgccaacttaggtgaacgtgtacgccaagctttgttaaaaacagtacaattctgtgatgccatgcgaaatgctggtattgttggtgtactgacattagataatcaagatctcaatggtaactggtatgatttcggtgatttcatacaaaccacgccaggtagtggagttcctgttgtagattcttattattcattgttaatgcctatattaaccttgaccagggctttaactgcagagtcacatgttgacactgacttaacaaagccttacattaagtgggatttgttaaaatatgacttcacggaagagaggttaaaactctttgaccgttattttaaatattgggatcagacataccacccaaattgtgttaactgtttggatgacagatgcattctgcattgtgcaaactttaatgttttattctctacagtgttcccacctacaagttttggaccactagtgagaaaaatatttgttgatggtgttccatttgtagtttcaactggataccacttcagagagctaggtgttgtacataatcaggatgtaaacttacatagctctagacttagttttaaggaattacttgtgtatgctgctgaccctgctatgcacgctgcttctggtaatctattactagataaacgcactacgtgcttttcagtagctgcacttactaacaatgttgcttttcaaactgtcaaacccggtaattttaacaaagacttctatgactttgctgtgtctaagggtttctttaaggaaggaagttctgttgaattaaaacacttcttctttgctcaggatggtaatgctgctatcagcgattatgactactatcgttataatctaccaacaatgtgtgatatcagacaactactatttgtagttgaagttgttgataagtactttgattgttacgatggtggctgtattaatgctaaccaagtcatcgtcaacaacctagacaaatcagctggttttccatttaataaatggggtaaggctagactttattatgattcaatgagttatgaggatcaagatgcacttttcgcatatacaaaacgtaatgtcatccctactataactcaaatgaatcttaagtatgccattagtgcaaagaatagagctcgcaccgtagctggtgtctctatctgtagtactatgaccaatagacagtttcatcaaaaattattgaaatcaatagccgccactagaggagctactgtagtaattggaacaagcaaattctatggtggttggcacaacatgttaaaaactgtttatagtgatgtagaaaaccctcaccttatgggttgggattatcctaaatgtgatagagccatgcctaacatgcttagaattatggcctcacttgttcttgctcgcaaacatacaacgtgttgtagcttgtcacaccgtttctatagattagctaatgagtgtgctcaagtattgagtgaaatggtcatgtgtggcggttcactatatgttaaaccaggtggaacctcatcaggagatgccacaactgcttatgctaatagtgtttttaacatttgtcaagctgtcacggccaatgttaatgcacttttatctactgatggtaacaaaattgccgataagtatgtccgcaatttacaacacagactttatgagtgtctctatagaaatagagatgttgacacagactttgtgaatgagttttacgcatatttgcgtaaacatttctcaatgatgatactctctgacgatgctgttgtgtgtttcaatagcacttatgcatctcaaggtctagtggctagcataaagaactttaagtcagttctttattatcaaaacaatgtttttatgtctgaagcaaaatgttggactgagactgaccttactaaaggacctcatgaattttgctctcaacatacaatgctagttaaacagggtgatgattatgtgtaccttccttacccagatccatcaagaatcctaggggccggctgttttgtagatgatatcgtaaaaacagatggtacacttatgattgaacggttcgtgtctttagctatagatgcttacccacttactaaacatcctaatcaggagtatgctgatgtctttcatttgtacttacaatacataagaaagctacatgatgagttaacaggacacatgttagacatgtattctgttatgcttactaatgataacacttcaaggtattgggaacctgagttttatgaggctatgtacacaccgcatacagtcttacaggctgttggggcttgtgttctttgcaattcacagacttcattaagatgtggtgcttgcatacgtagaccattcttatgttgtaaatgctgttacgaccatgtcatatcaacatcacataaattagtcttgtctgttaatccgtatgtttgcaatgctccaggttgtgatgtcacagatgtgactcaactttacttaggaggtatgagctattattgtaaatcacataaaccacccattagttttccattgtgtgctaatggacaagtttttggtttatataaaaatacatgtgttggtagcgataatgttactgactttaatgcaattgcaacatgtgactggacaaatgctggtgattacattttagctaacacctgtactgaaagactcaagctttttgcagcagaaacgctcaaagctactgaggagacatttaaactgtcttatggtattgctactgtacgtgaagtgctgtctgacagagaattacatctttcatgggaagttggtaaacctagaccaccacttaaccgaaattatgtctttactggttatcgtgtaactaaaaacagtaaagtacaaataggagagtacacctttgaaaaaggtgactatggtgatgctgttgtttaccgaggtacaacaacttacaaattaaatgttggtgattattttgtgctgacatcacatacagtaatgccattaagtgcacctacactagtgccacaagagcactatgttagaattactggcttatacccaacactcaatatctcagatgagttttctagcaatgttgcaaattatcaaaaggttggtatgcaaaagtattctacactccagggaccacctggtactggtaagagtcattttgctattggcctagctctctactacccttctgctcgcatagtgtatacagcttgctctcatgccgctgttgatgcactatgtgagaaggcattaaaatatttgcctatagataaatgtagtagaattatacctgcacgtgctcgtgtagagtgttttgataaattcaaagtgaattcaacattagaacagtatgtcttttgtactgtaaatgcattgcctgagacgacagcagatatagttgtctttgatgaaatttcaatggccacaaattatgatttgagtgttgtcaatgccagattacgtgctaagcactatgtgtacattggcgaccctgctcaattacctgcaccacgcacattgctaactaagggcacactagaaccagaatatttcaattcagtgtgtagacttatgaaaactataggtccagacatgttcctcggaacttgtcggcgttgtcctgctgaaattgttgacactgtgagtgctttggtttatgataataagcttaaagcacataaagacaaatcagctcaatgctttaaaatgttttataagggtgttatcacgcatgatgtttcatctgcaattaacaggccacaaataggcgtggtaagagaattccttacacgtaaccctgcttggagaaaagctgtctttatttcaccttataattcacagaatgctgtagcctcaaagattttgggactaccaactcaaactgttgattcatcacagggctcagaatatgactatgtcatattcactcaaaccactgaaacagctcactcttgtaatgtaaacagatttaatgttgctattaccagagcaaaagtaggcatactttgcataatgtctgatagagacctttatgacaagttgcaatttacaagtcttgaaattccacgtaggaatgtggcaactttacaagctgaaaatgtaacaggactctttaaagattgtagtaaggtaatcactgggttacatcctacacaggcacctacacacctcagtgttgacactaaattcaaaactgaaggtttatgtgttgacatacctggcatacctaaggacatgacctatagaagactcatctctatgatgggttttaaaatgaattatcaagttaatggttaccctaacatgtttatcacccgcgaagaagctataagacatgtacgtgcatggattggcttcgatgtcgaggggtgtcatgctactagagaagctgttggtaccaatttacctttacagctaggtttttctacaggtgttaacctagttgctgtacctacaggttatgttgatacacctaataatacagatttttccagagttagtgctaaaccaccgcctggagatcaatttaaacacctcataccacttatgtacaaaggacttccttggaatgtagtgcgtataaagattgtacaaatgttaagtgacacacttaaaaatctctctgacagagtcgtatttgtcttatgggcacatggctttgagttgacatctatgaagtattttgtgaaaataggacctgagcgcacctgttgtctatgtgatagacgtgccacatgcttttccactgcttcagacacttatgcctgttggcatcattctattggatttgattacgtctataatccgtttatgattgatgttcaacaatggggttttacaggtaacctacaaagcaaccatgatctgtattgtcaagtccatggtaatgcacatgtagctagttgtgatgcaatcatgactaggtgtctagctgtccacgagtgctttgttaagcgtgttgactggactattgaatatcctataattggtgatgaactgaagattaatgcggcttgtagaaaggttcaacacatggttgttaaagctgcattattagcagacaaattcccagttcttcacgacattggtaaccctaaagctattaagtgtgtacctcaagctgatgtagaatggaagttctatgatgcacagccttgtagtgacaaagcttataaaatagaagaattattctattcttatgccacacattctgacaaattcacagatggtgtatgcctattttggaattgcaatgtcgatagatatcctgctaattccattgtttgtagatttgacactagagtgctatctaaccttaacttgcctggttgtgatggtggcagtttgtatgtaaataaacatgcattccacacaccagcttttgataaaagtgcttttgttaatttaaaacaattaccatttttctattactctgacagtccatgtgagtctcatggaaaacaagtagtgtcagatatagattatgtaccactaaagtctgctacgtgtataacacgttgcaatttaggtggtgctgtctgtagacatcatgctaatgagtacagattgtatctcgatgcttataacatgatgatctcagctggctttagcttgtgggtttacaaacaatttgatacttataacctctggaacacttttacaagacttcagagtttagaaaatgtggcttttaatgttgtaaataagggacactttgatggacaacagggtgaagtaccagtttctatcattaataacactgtttacacaaaagttgatggtgttgatgtagaattgtttgaaaataaaacaacattacctgttaatgtagcatttgagctttgggctaagcgcaacattaaaccagtaccagaggtgaaaatactcaataatttgggtgtggacattgctgctaatactgtgatctgggactacaaaagagatgctccagcacatatatctactattggtgtttgttctatgactgacatagccaagaaaccaactgaaacgatttgtgcaccactcactgtcttttttgatggtagagttgatggtcaagtagacttatttagaaatgcccgtaatggtgttcttattacagaaggtagtgttaaaggtttacaaccatctgtaggtcccaaacaagctagtcttaatggagtcacattaattggagaagccgtaaaaacacagttcaattattataagaaagttgatggtgttgtccaacaattacctgaaacttactttactcagagtagaaatttacaagaatttaaacccaggagtcaaatggaaattgatttcttagaattagctatggatgaattcattgaacggtataaattagaaggctatgccttcgaacatatcgtttatggagattttagtcatagtcagttaggtggtttacatctactgattggactagctaaacgttttaaggaatcaccttttgaattagaagattttattcctatggacagtacagttaaaaactatttcataacagatgcgcaaacaggttcatctaagtgtgtgtgttctgttattgatttattacttgatgattttgttgaaataataaaatcccaagatttatctgtagtttctaaggttgtcaaagtgactattgactatacagaaatttcatttatgctttggtgtaaagatggccatgtagaaacattttacccaaaattacaatctagtcaagcgtggcaaccgggtgttgctatgcctaatctttacaaaatgcaaagaatgctattagaaaagtgtgaccttcaaaattatggtgatagtgcaacattacctaaaggcataatgatgaatgtcgcaaaatatactcaactgtgtcaatatttaaacacattaacattagctgtaccctataatatgagagttatacattttggtgctggttctgataaaggagttgcaccaggtacagctgttttaagacagtggttgcctacgggtacgctgcttgtcgattcagatcttaatgactttgtctctgatgcagattcaactttgattggtgattgtgcaactgtacatacagctaataaatgggatctcattattagtgatatgtacgaccctaagactaaaaatgttacaaaagaaaatgactctaaagagggttttttcacttacatttgtgggtttatacaacaaaagctagctcttggaggttccgtggctataaagataacagaacattcttggaatgctgatctttataagctcatgggacacttcgcatggtggacagcctttgttactaatgtgaatgcgtcatcatctgaagcatttttaattggatgtaattatcttggcaaaccacgcgaacaaatagatggttatgtcatgcatgcaaattacatattttggaggaatacaaatccaattcagttgtcttcctattctttatttgacatgagtaaatttccccttaaattaaggggtactgctgttatgtctttaaaagaaggtcaaatcaatgatatgattttatctcttcttagtaaaggtagacttataattagagaaaacaacagagttgttatttctagtgatgttcttgttaacaactaaacgaacaatgtttgtttttcttgttttattgccactagtctctagtcagtgtgttaatcttacaaccagaactcaattaccccctgcatacactaattctttcacacgtggtgtttattaccctgacaaagttttcagatcctcagttttacattcaactcaggacttgttcttacctttcttttccaatgttacttggttccatgctatacatgtctctgggaccaatggtactaagaggtttgataaccctgtcctaccatttaatgatggtgtttattttgcttccactgagaagtctaacataataagaggctggatttttggtactactttagattcgaagacccagtccctacttattgttaataacgctactaatgttgttattaaagtctgtgaatttcaattttgtaatgatccatttttgggtgtttattaccacaaaaacaacaaaagttggatggaaagtgagttcagagtttattctagtgcgaataattgcacttttgaatatgtctctcagccttttcttatggaccttgaaggaaaacagggtaatttcaaaaatcttagggaatttgtgtttaagaatattgatggttattttaaaatatattctaagcacacgcctattaatttagtgcgtgatctccctcagggtttttcggctttagaaccattggtagatttgccaataggtattaacatcactaggtttcaaactttacttgctttacatagaagttatttgactcctggtgattcttcttcaggttggacagctggtgctgcagcttattatgtgggttatcttcaacctaggacttttctattaaaatataatgaaaatggaaccattacagatgctgtagactgtgcacttgaccctctctcagaaacaaagtgtacgttgaaatccttcactgtagaaaaaggaatctatcaaacttctaactttagagtccaaccaacagaatctattgttagatttcctaatattacaaacttgtgcccttttggtgaagtttttaacgccaccagatttgcatctgtttatgcttggaacaggaagagaatcagcaactgtgttgctgattattctgtcctatataattccgcatcattttccacttttaagtgttatggagtgtctcctactaaattaaatgatctctgctttactaatgtctatgcagattcatttgtaattagaggtgatgaagtcagacaaatcgctccagggcaaactggaaagattgctgattataattataaattaccagatgattttacaggctgcgttatagcttggaattctaacaatcttgattctaaggttggtggtaattataattacctgtatagattgtttaggaagtctaatctcaaaccttttgagagagatatttcaactgaaatctatcaggccggtagcacaccttgtaatggtgttgaaggttttaattgttactttcctttacaatcatatggtttccaacccactaatggtgttggttaccaaccatacagagtagtagtactttcttttgaacttctacatgcaccagcaactgtttgtggacctaaaaagtctactaatttggttaaaaacaaatgtgtcaatttcaacttcaatggtttaacaggcacaggtgttcttactgagtctaacaaaaagtttctgcctttccaacaatttggcagagacattgctgacactactgatgctgtccgtgatccacagacacttgagattcttgacattacaccatgttcttttggtggtgtcagtgttataacaccaggaacaaatacttctaaccaggttgctgttctttatcaggatgttaactgcacagaagtccctgttgctattcatgcagatcaacttactcctacttggcgtgtttattctacaggttctaatgtttttcaaacacgtgcaggctgtttaataggggctgaacatgtcaacaactcatatgagtgtgacatacccattggtgcaggtatatgcgctagttatcagactcagactaattctcctcggcgggcacgtagtgtagctagtcaatccatcattgcctacactatgtcacttggtgcagaaaattcagttgcttactctaataactctattgccatacccacaaattttactattagtgttaccacagaaattctaccagtgtctatgaccaagacatcagtagattgtacaatgtacatttgtggtgattcaactgaatgcagcaatcttttgttgcaatatggcagtttttgtacacaattaaaccgtgctttaactggaatagctgttgaacaagacaaaaacacccaagaagtttttgcacaagtcaaacaaatttacaaaacaccaccaattaaagattttggtggttttaatttttcacaaatattaccagatccatcaaaaccaagcaagaggtcatttattgaagatctacttttcaacaaagtgacacttgcagatgctggcttcatcaaacaatatggtgattgccttggtgatattgctgctagagacctcatttgtgcacaaaagtttaacggccttactgttttgccacctttgctcacagatgaaatgattgctcaatacacttctgcactgttagcgggtacaatcacttctggttggacctttggtgcaggtgctgcattacaaataccatttgctatgcaaatggcttataggtttaatggtattggagttacacagaatgttctctatgagaaccaaaaattgattgccaaccaatttaatagtgctattggcaaaattcaagactcactttcttccacagcaagtgcacttggaaaacttcaagatgtggtcaaccaaaatgcacaagctttaaacacgcttgttaaacaacttagctccaattttggtgcaatttcaagtgttttaaatgatatcctttcacgtcttgacaaagttgaggctgaagtgcaaattgataggttgatcacaggcagacttcaaagtttgcagacatatgtgactcaacaattaattagagctgcagaaatcagagcttctgctaatcttgctgctactaaaatgtcagagtgtgtacttggacaatcaaaaagagttgatttttgtggaaagggctatcatcttatgtccttccctcagtcagcacctcatggtgtagtcttcttgcatgtgacttatgtccctgcacaagaaaagaacttcacaactgctcctgccatttgtcatgatggaaaagcacactttcctcgtgaaggtgtctttgtttcaaatggcacacactggtttgtaacacaaaggaatttttatgaaccacaaatcattactacagacaacacatttgtgtctggtaactgtgatgttgtaataggaattgtcaacaacacagtttatgatcctttgcaacctgaattagactcattcaaggaggagttagataaatattttaagaatcatacatcaccagatgttgatttaggtgacatctctggcattaatgcttcagttgtaaacattcaaaaagaaattgaccgcctcaatgaggttgccaagaatttaaatgaatctctcatcgatctccaagaacttggaaagtatgagcagtatataaaatggccatggtacatttggctaggttttatagctggcttgattgccatagtaatggtgacaattatgctttgctgtatgaccagttgctgtagttgtctcaagggctgttgttcttgtggatcctgctgcaaatttgatgaagacgactctgagccagtgctcaaaggagtcaaattacattacacataaacgaacttatggatttgtttatgagaatcttcacaattggaactgtaactttgaagcaaggtgaaatcaaggatgctactccttcagattttgttcgcgctactgcaacgataccgatacaagcctcactccctttcggatggcttattgttggcgttgcacttcttgctgtttttcagagcgcttccaaaatcataaccctcaaaaagagatggcaactagcactctccaagggtgttcactttgtttgcaacttgctgttgttgtttgtaacagtttactcacaccttttgctcgttgctgctggccttgaagccccttttctctatctttatgctttagtctacttcttgcagagtataaactttgtaagaataataatgaggctttggctttgctggaaatgccgttccaaaaacccattactttatgatgccaactattttctttgctggcatactaattgttacgactattgtataccttacaatagtgtaacttcttcaattgtcattacttcaggtgatggcacaacaagtcctatttctgaacatgactaccagattggtggttatactgaaaaatgggaatctggagtaaaagactgtgttgtattacacagttacttcacttcagactattaccagctgtactcaactcaattgagtacagacactggtgttgaacatgttaccttcttcatctacaataaaattttgatgagcctgaagaacatgtccaaattcacacaatcgacggttcatccggagttgttaatccagtaatggaaccaatttatgatgaaccgacgacgactactagcgtgcctttgtaagcacaagctgatgagtacgaacttatgtactcattcgtttcggaagagacaggtacgttaatagttaatagcgtacttctttttcttgctttcgtggtattcttgctagttacactagccatccttactgcgcttcgattgtgtgcgtactgctgcaatattgttaacgtgagtcttgtaaaaccttctttttacgtttactctcgtgttaaaaatctgaattcttctagagttcctgatcttctggtctaaacgaactaaatattatattagtttttctgtttggaactttaattttagccatggcagattccaacggtactattaccgttgaagagcttaaaaagctccttgaacaatggaacctagtaataggtttcctattccttacatggatttgtcttctacaatttgcctatgccaacaggaataggtttttgtatataattaagttaattttcctctggctgttatggccagtaactttagcttgttttgtgcttgctgctgtttacagaataaattggatcaccggtggaattgctatcgcaatggcttgtcttgtaggcttgatgtggctcagctacttcattgcttctttcagactgtttgcgcgtacgcgttccatgtggtcattcaatccagaaactaacattcttctcaacgtgccactccatggcactattctgaccagaccgcttctagaaagtgaactcgtaatcggagctgtgatccttcgtggacatcttcgtattgctggacaccatctaggacgctgtgacatcaaggacctgcctaaagaaatcactgttgctacatcacgaacgctttcttattacaaattgggagcttcgcagcgtgtagcaggtgactcaggttttgctgcatacagtcgctacaggattggcaactataaattaaacacagaccattccagtagcagtgacaatattgctttgcttgtacagtaagtgacaacagatgtttcatctcgttgactttcaggttactatagcagagatattactaattattatgaggacttttaaagtttccatttggaatcttgattacatcataaacctcataattaaaaatttatctaagtcactaactgagaataaatattctcaattagatgaagagcaaccaatggagattgattaaacgaacatgaaaattattcttttcttggcactgataacactcgctacttgtgagctttatcactaccaagagtgtgttagaggtacaacagtacttttaaaagaaccttgctcttctggaacatacgagggcaattcaccatttcatcctctagctgataacaaatttgcactgacttgctttagcactcaatttgcttttgcttgtcctgacggcgtaaaacacgtctatcagttacgtgccagatcagtttcacctaaactgttcatcagacaagaggaagttcaagaactttactctccaatttttcttattgttgcggcaatagtgtttataacactttgcttcacactcaaaagaaagacagaatgattgaactttcattaattgacttctatttgtgctttttagcctttctgctattccttgttttaattatgcttattatcttttggttctcacttgaactgcaagatcataatgaaacttgtcacgcctaaacgaacatgaaatttcttgttttcttaggaatcatcacaactgtagctgcatttcaccaagaatgtagtttacagtcatgtactcaacatcaaccatatgtagttgatgacccgtgtcctattcacttctattctaaatggtatattagagtaggagctagaaaatcagcacctttaattgaattgtgcgtggatgaggctggttctaaatcacccattcagtacatcgatatcggtaattatacagtttcctgtttaccttttacaattaattgccaggaacctaaattgggtagtcttgtagtgcgttgttcgttctatgaagactttttagagtatcatgacgttcgtgttgttttagatttcatctaaacgaacaaactaaaatgtctgataatggaccccaaaatcagcgaaatgcaccccgcattacgtttggtggaccctcagattcaactggcagtaaccagaatggagaacgcagtggggcgcgatcaaaacaacgtcggccccaaggtttacccaataatactgcgtcttggttcaccgctctcactcaacatggcaaggaagaccttaaattccctcgaggacaaggcgttccaattaacaccaatagcagtccagatgaccaaattggctactaccgaagagctaccagacgaattcgtggtggtgacggtaaaatgaaagatctcagtccaagatggtatttctactacctaggaactgggccagaagctggacttccctatggtgctaacaaagacggcatcatatgggttgcaactgagggagccttgaatacaccaaaagatcacattggcacccgcaatcctgctaacaatgctgcaatcgtgctacaacttcctcaaggaacaacattgccaaaaggcttctacgcagaagggagcagaggcggcagtcaagcctcttctcgttcctcatcacgtagtcgcaacagttcaagaaattcaactccaggcagcagtaggggaacttctcctgctagaatggctggcaatggcggtgatgctgctcttgctttgctgctgcttgacagattgaaccagcttgagagcaaaatgtctggtaaaggccaacaacaacaaggccaaactgtcactaagaaatctgctgctgaggcttctaagaagcctcggcaaaaacgtactgccactaaagcatacaatgtaacacaagctttcggcagacgtggtccagaacaaacccaaggaaattttggggaccaggaactaatcagacaaggaactgattacaaacattggccgcaaattgcacaatttgcccccagcgcttcagcgttcttcggaatgtcgcgcattggcatggaagtcacaccttcgggaacgtggttgacctacacaggtgccatcaaattggatgacaaagatccaaatttcaaagatcaagtcattttgctgaataagcatattgacgcatacaaaacattcccaccaacagagcctaaaaaggacaaaaagaagaaggctgatgaaactcaagccttaccgcagagacagaagaaacagcaaactgtgactcttcttcctgctgcagatttggatgatttctccaaacaattgcaacaatccatgagcagtgctgactcaactcaggcctaaactcatgcagaccacacaaggcagatgggctatataaacgttttcgcttttccgtttacgatatatagtctactcttgtgcagaatgaattctcgtaactacatagcacaagtagatgtagttaactttaatctcacatagcaatctttaatcagtgtgtaacattagggaggacttgaaagagccaccacattttcaccgaggccacgcggagtacgatcgagtgtacagtgaacaatgctagggagagctgcctatatggaagagccctaatgtgtaaaattaattttagtagtgctatccccatgtgattttaatagcttcttaggagaatgacaaaaaaaaaaaaaaaaaaaaaaaaaaaaaaaaa

SEQ ID NO: 5 - DNA, 29903 bp, Severe acute respiratory syndrome coronavirus 2
  source 1..29903: mol_type = unassigned DNA
tttttttttttttttttttttttttttttttttgtcattctcctaagaagctattaaaatcacatggggatagcactactaaaattaattttacacattagggctcttccatataggcagctctccctagcattgttcactgtacactcgatcgtactccgcgtggcctcggtgaaaatgtggtggctctttcaagtcctccctaatgttacacactgattaaagattgctatgtgagattaaagttaactacatctacttgtgctatgtagttacgagaattcattctgcacaagagtagactatatatcgtaaacggaaaagcgaaaacgtttatatagcccatctgccttgtgtggtctgcatgagtttaggcctgagttgagtcagcactgctcatggattgttgcaattgtttggagaaatcatccaaatctgcagcaggaagaagagtcacagtttgctgtttcttctgtctctgcggtaaggcttgagtttcatcagccttcttctttttgtcctttttaggctctgttggtgggaatgttttgtatgcgtcaatatgcttattcagcaaaatgacttgatctttgaaatttggatctttgtcatccaatttgatggcacctgtgtaggtcaaccacgttcccgaaggtgtgacttccatgccaatgcgcgacattccgaagaacgctgaagcgctgggggcaaattgtgcaatttgcggccaatgtttgtaatcagttccttgtctgattagttcctggtccccaaaatttccttgggtttgttctggaccacgtctgccgaaagcttgtgttacattgtatgctttagtggcagtacgtttttgccgaggcttcttagaagcctcagcagcagatttcttagtgacagtttggccttgttgttgttggcctttaccagacattttgctctcaagctggttcaatctgtcaagcagcagcaaagcaagagcagcatcaccgccattgccagccattctagcaggagaagttcccctactgctgcctggagttgaatttcttgaactgttgcgactacgtgatgaggaacgagaagaggcttgactgccgcctctgctcccttctgcgtagaagccttttggcaatgttgttccttgaggaagttgtagcacgattgcagcattgttagcaggattgcgggtgccaatgtgatcttttggtgtattcaaggctccctcagttgcaacccatatgatgccgtctttgttagcaccatagggaagtccagcttctggcccagttcctaggtagtagaaataccatcttggactgagatctttcattttaccgtcaccaccacgaattcgtctggtagctcttcggtagtagccaatttggtcatctggactgctattggtgttaattggaacgccttgtcctcgagggaatttaaggtcttccttgccatgttgagtgagagcggtgaaccaagacgcagtattattgggtaaaccttggggccgacgttgttttgatcgcgccccactgcgttctccattctggttactgccagttgaatctgagggtccaccaaacgtaatgcggggtgcatttcgctgattttggggtccattatcagacattttagtttgttcgtttagatgaaatctaaaacaacacgaacgtcatgatactctaaaaagtcttcatagaacgaacaacgcactacaagactacccaatttaggttcctggcaattaattgtaaaaggtaaacaggaaactgtataattaccgatatcgatgtactgaatgggtgatttagaaccagcctcatccacgcacaattcaattaaaggtgctgattttctagctcctactctaatataccatttagaatagaagtgaataggacacgggtcatcaactacatatggttgatgttgagtacatgactgtaaactacattcttggtgaaatgcagctacagttgtgatgattcctaagaaaacaagaaatttcatgttcgtttaggcgtgacaagtttcattatgatcttgcagttcaagtgagaaccaaaagataataagcataattaaaacaaggaatagcagaaaggctaaaaagcacaaatagaagtcaattaatgaaagttcaatcattctgtctttcttttgagtgtgaagcaaagtgttataaacactattgccgcaacaataagaaaaattggagagtaaagttcttgaacttcctcttgtctgatgaacagtttaggtgaaactgatctggcacgtaactgatagacgtgttttacgccgtcaggacaagcaaaagcaaattgagtgctaaagcaagtcagtgcaaatttgttatcagctagaggatgaaatggtgaattgccctcgtatgttccagaagagcaaggttcttttaaaagtactgttgtacctctaacacactcttggtagtgataaagctcacaagtagcgagtgttatcagtgccaagaaaagaataattttcatgttcgtttaatcaatctccattggttgctcttcatctaattgagaatatttattctcagttagtgacttagataaatttttaattatgaggtttatgatgtaatcaagattccaaatggaaactttaaaagtcctcataataattagtaatatctctgctatagtaacctgaaagtcaacgagatgaaacatctgttgtcacttactgtacaagcaaagcaatattgtcactgctactggaatggtctgtgtttaatttatagttgccaatcctgtagcgactgtatgcagcaaaacctgagtcacctgctacacgctgcgaagctcccaatttgtaataagaaagcgttcgtgatgtagcaacagtgatttctttaggcaggtccttgatgtcacagcgtcctagatggtgtccagcaatacgaagatgtccacgaaggatcacagctccgattacgagttcactttctagaagcggtctggtcagaatagtgccatggagtggcacgttgagaagaatgttagtttctggattgaatgaccacatggaacgcgtacgcgcaaacagtctgaaagaagcaatgaagtagctgagccacatcaagcctacaagacaagccattgcgatagcaattccaccggtgatccaatttattctgtaaacagcagcaagcacaaaacaagctaaagttactggccataacagccagaggaaaattaacttaattatatacaaaaacctattcctgttggcataggcaaattgtagaagacaaatccatgtaaggaataggaaacctattactaggttccattgttcaaggagctttttaagctcttcaacggtaatagtaccgttggaatctgccatggctaaaattaaagttccaaacagaaaaactaatataatatttagttcgtttagaccagaagatcaggaactctagaagaattcagatttttaacacgagagtaaacgtaaaaagaaggttttacaagactcacgttaacaatattgcagcagtacgcacacaatcgaagcgcagtaaggatggctagtgtaactagcaagaataccacgaaagcaagaaaaagaagtacgctattaactattaacgtacctgtctcttccgaaacgaatgagtacataagttcgtactcatcagcttgtgcttacaaaggcacgctagtagtcgtcgtcggttcatcataaattggttccattactggattaacaactccggatgaaccgtcgattgtgtgaatttggacatgttcttcaggctcatcaacaattttattgtagatgaagaaggtaacatgttcaacaccagtgtctgtactcaattgagttgagtacagctggtaatagtctgaagtgaagtaactgtgtaatacaacacagtcttttactccagattcccatttttcagtataaccaccaatctggtagtcatgttcagaaataggacttgttgtgccatcacctgaagtaatgacaattgaagaagttacactattgtaaggtatacaatagtcgtaacaattagtatgccagcaaagaaaatagttggcatcataaagtaatgggtttttggaacggcatttccagcaaagccaaagcctcattattattcttacaaagtttatactctgcaagaagtagactaaagcataaagatagagaaaaggggcttcaaggccagcagcaacgagcaaaaggtgtgagtaaactgttacaaacaacaacagcaagttgcaaacaaagtgaacacccttggagagtgctagttgccatctctttttgagggttatgattttggaagcgctctgaaaaacagcaagaagtgcaacgccaacaataagccatccgaaagggagtgaggcttgtatcggtatcgttgcagtagcgcgaacaaaatctgaaggagtagcatccttgatttcaccttgcttcaaagttacagttccaattgtgaagattctcataaacaaatccataagttcgtttatgtgtaatgtaatttgactcctttgagcactggctcagagtcgtcttcatcaaatttgcagcaggatccacaagaacaacagcccttgagacaactacagcaactggtcatacagcaaagcataattgtcaccattactatggcaatcaagccagctataaaacctagccaaatgtaccatggccattttatatactgctcatactttccaagttcttggagatcgatgagagattcatttaaattcttggcaacctcattgaggcggtcaatttctttttgaatgtttacaactgaagcattaatgccagagatgtcacctaaatcaacatctggtgatgtatgattcttaaaatatttatctaactcctccttgaatgagtctaattcaggttgcaaaggatcataaactgtgttgttgacaattcctattacaacatcacagttaccagacacaaatgtgttgtctgtagtaatgatttgtggttcataaaaattcctttgtgttacaaaccagtgtgtgccatttgaaacaaagacaccttcacgaggaaagtgtgcttttccatcatgacaaatggcaggagcagttgtgaagttcttttcttgtgcagggacataagtcacatgcaagaagactacaccatgaggtgctgactgagggaaggacataagatgatagccctttccacaaaaatcaactctttttgattgtccaagtacacactctgacattttagtagcagcaagattagcagaagctctgatttctgcagctctaattaattgttgagtcacatatgtctgcaaactttgaagtctgcctgtgatcaacctatcaatttgcacttcagcctcaactttgtcaagacgtgaaaggatatcatttaaaacacttgaaattgcaccaaaattggagctaagttgtttaacaagcgtgtttaaagcttgtgcattttggttgaccacatcttgaagttttccaagtgcacttgctgtggaagaaagtgagtcttgaattttgccaatagcactattaaattggttggcaatcaatttttggttctcatagagaacattctgtgtaactccaataccattaaacctataagccatttgcatagcaaatggtatttgtaatgcagcacctgcaccaaaggtccaaccagaagtgattgtacccgctaacagtgcagaagtgtattgagcaatcatttcatctgtgagcaaaggtggcaaaacagtaaggccgttaaacttttgtgcacaaatgaggtctctagcagcaatatcaccaaggcaatcaccatattgtttgatgaagccagcatctgcaagtgtcactttgttgaaaagtagatcttcaataaatgacctcttgcttggttttgatggatctggtaatatttgtgaaaaattaaaaccaccaaaatctttaattggtggtgttttgtaaatttgtttgacttgtgcaaaaacttcttgggtgtttttgtcttgttcaacagctattccagttaaagcacggtttaattgtgtacaaaaactgccatattgcaacaaaagattgctgcattcagttgaatcaccacaaatgtacattgtacaatctactgatgtcttggtcatagacactggtagaatttctgtggtaacactaatagtaaaatttgtgggtatggcaatagagttattagagtaagcaactgaattttctgcaccaagtgacatagtgtaggcaatgatggattgactagctacactacgtgcccgccgaggagaattagtctgagtctgataactagcgcatatacctgcaccaatgggtatgtcacactcatatgagttgttgacatgttcagcccctattaaacagcctgcacgtgtttgaaaaacattagaacctgtagaataaacacgccaagtaggagtaagttgatctgcatgaatagcaacagggacttctgtgcagttaacatcctgataaagaacagcaacctggttagaagtatttgttcctggtgttataacactgacaccaccaaaagaacatggtgtaatgtcaagaatctcaagtgtctgtggatcacggacagcatcagtagtgtcagcaatgtctctgccaaattgttggaaaggcagaaactttttgttagactcagtaagaacacctgtgcctgttaaaccattgaagttgaaattgacacatttgtttttaaccaaattagtagactttttaggtccacaaacagttgctggtgcatgtagaagttcaaaagaaagtactactactctgtatggttggtaaccaacaccattagtgggttggaaaccatatgattgtaaaggaaagtaacaattaaaaccttcaacaccattacaaggtgtgctaccggcctgatagatttcagttgaaatatctctctcaaaaggtttgagattagacttcctaaacaatctatacaggtaattataattaccaccaaccttagaatcaagattgttagaattccaagctataacgcagcctgtaaaatcatctggtaatttataattataatcagcaatctttccagtttgccctggagcgatttgtctgacttcatcacctctaattacaaatgaatctgcatagacattagtaaagcagagatcatttaatttagtaggagacactccataacacttaaaagtggaaaatgatgcggaattatataggacagaataatcagcaacacagttgctgattctcttcctgttccaagcataaacagatgcaaatctggtggcgttaaaaacttcaccaaaagggcacaagtttgtaatattaggaaatctaacaatagattctgttggttggactctaaagttagaagtttgatagattcctttttctacagtgaaggatttcaacgtacactttgtttctgagagagggtcaagtgcacagtctacagcatctgtaatggttccattttcattatattttaatagaaaagtcctaggttgaagataacccacataataagctgcagcaccagctgtccaacctgaagaagaatcaccaggagtcaaataacttctatgtaaagcaagtaaagtttgaaacctagtgatgttaatacctattggcaaatctaccaatggttctaaagccgaaaaaccctgagggagatcacgcactaaattaataggcgtgtgcttagaatatattttaaaataaccatcaatattcttaaacacaaattccctaagatttttgaaattaccctgttttccttcaaggtccataagaaaaggctgagagacatattcaaaagtgcaattattcgcactagaataaactctgaactcactttccatccaacttttgttgtttttgtggtaataaacacccaaaaatggatcattacaaaattgaaattcacagactttaataacaacattagtagcgttattaacaataagtagggactgggtcttcgaatctaaagtagtaccaaaaatccagcctcttattatgttagacttctcagtggaagcaaaataaacaccatcattaaatggtaggacagggttatcaaacctcttagtaccattggtcccagagacatgtatagcatggaaccaagtaacattggaaaagaaaggtaagaacaagtcctgagttgaatgtaaaactgaggatctgaaaactttgtcagggtaataaacaccacgtgtgaaagaattagtgtatgcagggggtaattgagttctggttgtaagattaacacactgactagagactagtggcaataaaacaagaaaaacaaacattgttcgtttagttgttaacaagaacatcactagaaataacaactctgttgttttctctaattataagtctacctttactaagaagagataaaatcatatcattgatttgaccttcttttaaagacataacagcagtaccccttaatttaaggggaaatttactcatgtcaaataaagaataggaagacaactgaattggatttgtattcctccaaaatatgtaatttgcatgcatgacataaccatctatttgttcgcgtggtttgccaagataattacatccaattaaaaatgcttcagatgatgacgcattcacattagtaacaaaggctgtccaccatgcgaagtgtcccatgagcttataaagatcagcattccaagaatgttctgttatctttatagccacggaacctccaagagctagcttttgttgtataaacccacaaatgtaagtgaaaaaaccctctttagagtcattttcttttgtaacatttttagtcttagggtcgtacatatcactaataatgagatcccatttattagctgtatgtacagttgcacaatcaccaatcaaagttgaatctgcatcagagacaaagtcattaagatctgaatcgacaagcagcgtacccgtaggcaaccactgtcttaaaacagctgtacctggtgcaactcctttatcagaaccagcaccaaaatgtataactctcatattatagggtacagctaatgttaatgtgtttaaatattgacacagttgagtatattttgcgacattcatcattatgcctttaggtaatgttgcactatcaccataattttgaaggtcacacttttctaatagcattctttgcattttgtaaagattaggcatagcaacacccggttgccacgcttgactagattgtaattttgggtaaaatgtttctacatggccatctttacaccaaagcataaatgaaatttctgtatagtcaatagtcactttgacaaccttagaaactacagataaatcttgggattttattatttcaacaaaatcatcaagtaataaatcaataacagaacacacacacttagatgaacctgtttgcgcatctgttatgaaatagtttttaactgtactgtccataggaataaaatcttctaattcaaaaggtgattccttaaaacgtttagctagtccaatcagtagatgtaaaccacctaactgactatgactaaaatctccataaacgatatgttcgaaggcatagccttctaatttataccgttcaatgaattcatccatagctaattctaagaaatcaatttccatttgactcctgggtttaaattcttgtaaatttctactctgagtaaagtaagtttcaggtaattgttggacaacaccatcaactttcttataataattgaactgtgtttttacggcttctccaattaatgtgactccattaagactagcttgtttgggacctacagatggttgtaaacctttaacactaccttctgtaataagaacaccattacgggcatttctaaataagtctacttgaccatcaactctaccatcaaaaaagacagtgagtggtgcacaaatcgtttcagttggtttcttggctatgtcagtcatagaacaaacaccaatagtagatatatgtgctggagcatctcttttgtagtcccagatcacagtattagcagcaatgtccacacccaaattattgagtattttcacctctggtactggtttaatgttgcgcttagcccaaagctcaaatgctacattaacaggtaatgttgttttattttcaaacaattctacatcaacaccatcaacttttgtgtaaacagtgttattaatgatagaaactggtacttcaccctgttgtccatcaaagtgtcccttatttacaacattaaaagccacattttctaaactctgaagtcttgtaaaagtgttccagaggttataagtatcaaattgtttgtaaacccacaagctaaagccagctgagatcatcatgttataagcatcgagatacaatctgtactcattagcatgatgtctacagacagcaccacctaaattgcaacgtgttatacacgtagcagactttagtggtacataatctatatctgacactacttgttttccatgagactcacatggactgtcagagtaatagaaaaatggtaattgttttaaattaacaaaagcacttttatcaaaagctggtgtgtggaatgcatgtttatttacatacaaactgccaccatcacaaccaggcaagttaaggttagatagcactctagtgtcaaatctacaaacaatggaattagcaggatatctatcgacattgcaattccaaaataggcatacaccatctgtgaatttgtcagaatgtgtggcataagaatagaataattcttctattttataagctttgtcactacaaggctgtgcatcatagaacttccattctacatcagcttgaggtacacacttaatagctttagggttaccaatgtcgtgaagaactgggaatttgtctgctaataatgcagctttaacaaccatgtgttgaacctttctacaagccgcattaatcttcagttcatcaccaattataggatattcaatagtccagtcaacacgcttaacaaagcactcgtggacagctagacacctagtcatgattgcatcacaactagctacatgtgcattaccatggacttgacaatacagatcatggttgctttgtaggttacctgtaaaaccccattgttgaacatcaatcataaacggattatagacgtaatcaaatccaatagaatgatgccaacaggcataagtgtctgaagcagtggaaaagcatgtggcacgtctatcacatagacaacaggtgcgctcaggtcctattttcacaaaatacttcatagatgtcaactcaaagccatgtgcccataagacaaatacgactctgtcagagagatttttaagtgtgtcacttaacatttgtacaatctttatacgcactacattccaaggaagtcctttgtacataagtggtatgaggtgtttaaattgatctccaggcggtggtttagcactaactctggaaaaatctgtattattaggtgtatcaacataacctgtaggtacagcaactaggttaacacctgtagaaaaacctagctgtaaaggtaaattggtaccaacagcttctctagtagcatgacacccctcgacatcgaagccaatccatgcacgtacatgtcttatagcttcttcgcgggtgataaacatgttagggtaaccattaacttgataattcattttaaaacccatcatagagatgagtcttctataggtcatgtccttaggtatgccaggtatgtcaacacataaaccttcagttttgaatttagtgtcaacactgaggtgtgtaggtgcctgtgtaggatgtaacccagtgattaccttactacaatctttaaagagtcctgttacattttcagcttgtaaagttgccacattcctacgtggaatttcaagacttgtaaattgcaacttgtcataaaggtctctatcagacattatgcaaagtatgcctacttttgctctggtaatagcaacattaaatctgtttacattacaagagtgagctgtttcagtggtttgagtgaatatgacatagtcatattctgagccctgtgatgaatcaacagtttgagttggtagtcccaaaatctttgaggctacagcattctgtgaattataaggtgaaataaagacagcttttctccaagcagggttacgtgtaaggaattctcttaccacgcctatttgtggcctgttaattgcagatgaaacatcatgcgtgataacacccttataaaacattttaaagcattgagctgatttgtctttatgtgctttaagcttattatcataaaccaaagcactcacagtgtcaacaatttcagcaggacaacgccgacaagttccgaggaacatgtctggacctatagttttcataagtctacacactgaattgaaatattctggttctagtgtgcccttagttagcaatgtgcgtggtgcaggtaattgagcagggtcgccaatgtacacatagtgcttagcacgtaatctggcattgacaacactcaaatcataatttgtggccattgaaatttcatcaaagacaactatatctgctgtcgtctcaggcaatgcatttacagtacaaaagacatactgttctaatgttgaattcactttgaatttatcaaaacactctacacgagcacgtgcaggtataattctactacatttatctataggcaaatattttaatgccttctcacatagtgcatcaacagcggcatgagagcaagctgtatacactatgcgagcagaagggtagtagagagctaggccaatagcaaaatgactcttaccagtaccaggtggtccctggagtgtagaatacttttgcataccaaccttttgataatttgcaacattgctagaaaactcatctgagatattgagtgttgggtataagccagtaattctaacatagtgctcttgtggcactagtgtaggtgcacttaatggcattactgtatgtgatgtcagcacaaaataatcaccaacatttaatttgtaagttgttgtacctcggtaaacaacagcatcaccatagtcacctttttcaaaggtgtactctcctatttgtactttactgtttttagttacacgataaccagtaaagacataatttcggttaagtggtggtctaggtttaccaacttcccatgaaagatgtaattctctgtcagacagcacttcacgtacagtagcaataccataagacagtttaaatgtctcctcagtagctttgagcgtttctgctgcaaaaagcttgagtctttcagtacaggtgttagctaaaatgtaatcaccagcatttgtccagtcacatgttgcaattgcattaaagtcagtaacattatcgctaccaacacatgtatttttatataaaccaaaaacttgtccattagcacacaatggaaaactaatgggtggtttatgtgatttacaataatagctcatacctcctaagtaaagttgagtcacatctgtgacatcacaacctggagcattgcaaacatacggattaacagacaagactaatttatgtgatgttgatatgacatggtcgtaacagcatttacaacataagaatggtctacgtatgcaagcaccacatcttaatgaagtctgtgaattgcaaagaacacaagccccaacagcctgtaagactgtatgcggtgtgtacatagcctcataaaactcaggttcccaataccttgaagtgttatcattagtaagcataacagaatacatgtctaacatgtgtcctgttaactcatcatgtagctttcttatgtattgtaagtacaaatgaaagacatcagcatactcctgattaggatgtttagtaagtgggtaagcatctatagctaaagacacgaaccgttcaatcataagtgtaccatctgtttttacgatatcatctacaaaacagccggcccctaggattcttgatggatctgggtaaggaaggtacacataatcatcaccctgtttaactagcattgtatgttgagagcaaaattcatgaggtcctttagtaaggtcagtctcagtccaacattttgcttcagacataaaaacattgttttgataataaagaactgacttaaagttctttatgctagccactagaccttgagatgcataagtgctattgaaacacacaacagcatcgtcagagagtatcatcattgagaaatgtttacgcaaatatgcgtaaaactcattcacaaagtctgtgtcaacatctctatttctatagagacactcataaagtctgtgttgtaaattgcggacatacttatcggcaattttgttaccatcagtagataaaagtgcattaacattggccgtgacagcttgacaaatgttaaaaacactattagcataagcagttgtggcatctcctgatgaggttccacctggtttaacatatagtgaaccgccacacatgaccatttcactcaatacttgagcacactcattagctaatctatagaaacggtgtgacaagctacaacacgttgtatgtttgcgagcaagaacaagtgaggccataattctaagcatgttaggcatggctctatcacatttaggataatcccaacccataaggtgagggttttctacatcactataaacagtttttaacatgttgtgccaaccaccatagaatttgcttgttccaattactacagtagctcctctagtggcggctattgatttcaataatttttgatgaaactgtctattggtcatagtactacagatagagacaccagctacggtgcgagctctattctttgcactaatggcatacttaagattcatttgagttatagtagggatgacattacgttttgtatatgcgaaaagtgcatcttgatcctcataactcattgaatcataataaagtctagccttaccccatttattaaatggaaaaccagctgatttgtctaggttgttgacgatgacttggttagcattaatacagccaccatcgtaacaatcaaagtacttatcaacaacttcaactacaaatagtagttgtctgatatcacacattgttggtagattataacgatagtagtcataatcgctgatagcagcattaccatcctgagcaaagaagaagtgttttaattcaacagaacttccttccttaaagaaacccttagacacagcaaagtcatagaagtctttgttaaaattaccgggtttgacagtttgaaaagcaacattgttagtaagtgcagctactgaaaagcacgtagtgcgtttatctagtaatagattaccagaagcagcgtgcatagcagggtcagcagcatacacaagtaattccttaaaactaagtctagagctatgtaagtttacatcctgattatgtacaacacctagctctctgaagtggtatccagttgaaactacaaatggaacaccatcaacaaatatttttctcactagtggtccaaaacttgtaggtgggaacactgtagagaataaaacattaaagtttgcacaatgcagaatgcatctgtcatccaaacagttaacacaatttgggtggtatgtctgatcccaatatttaaaataacggtcaaagagttttaacctctcttccgtgaagtcatattttaacaaatcccacttaatgtaaggctttgttaagtcagtgtcaacatgtgactctgcagttaaagccctggtcaaggttaatataggcattaacaatgaataataagaatctacaacaggaactccactacctggcgtggtttgtatgaaatcaccgaaatcataccagttaccattgagatcttgattatctaatgtcagtacaccaacaataccagcatttcgcatggcatcacagaattgtactgtttttaacaaagcttggcgtacacgttcacctaagttggcgtatacgcgtaatatatctgggttttctacaaaatcataccagtcctttttattgaaataatcatcatcacaacaattgtatgtgacaagtatttcttttaatgtgtcacaattaccttcatcaaaatgccttaaagcatagacgaggtctgccattgtgtatttagtaagacgttgacgtgatatatgtggtaccatgtcaccgtctattctaaacttaaagaagtcatgtttagcaacagctggacaatccttaagtaaattataaattgtttcttcatgttggtagttagagaaagtgtgtctcttaactacaaagtaagaatcaattaaattgtcatcttcgtccttttcttggaagcgacaacaattagtttttaggaatttagcaaaaccagctactttatcattgtagatgtcaaaagccctgtatacgacatcagtactagtgcctgtgccgcacggtgtaagacgggctgcacttacaccgcaaacccgtttaaaaacgattgtgcatcagctgactgaagcatgggttcgcggagttgatcacaactacagccataacctttccacataccgcagacggtacagactgtgtttttaagtgtaaaacccacagggtcattagcacaagttgtaggtatttgtacatacttaccttttaagtcacaaaatcctttaggatttggatgatctatgtggcaacggcagtacagacaacacgatgcaccaccaaaggattcttgatccatattggcttccggtgtaactgttattgcctgaccagtaccagtgtgtgtacacaacatcttaacacaattagtgattggttgtcccccactagctagataatctttgtaagctttagcagcatctacagcaaaagcacagaaagataatacagttgaattggcaggcacttctgttgcattaccagcttgtagacgtactgtggcagctaaactaccaagtaccatacctctatttaggttgtttaatcctttaataaagtataaatacttcactttaggacctttaggtgtgtctgtaacaaacctacaaggtggttccagttctgtatagatagtaccagttccatcactcttagggaatctagcccatttcaaatcctgtaaatcggataacagtgcaagtacaaacctacctccctttgttgtgttgtagtaagctaacgcattgtcatcagtgcaagcagtttgtgtagtaccggcagcacaagacatctgtcgtagtgcaacaggactaagctcattattctgtaatttgacagcagaattggcccttaaagctgttacaataagaggccatgctaaattaggtgaattgtccatactaatttcactaagttgaacaattttactatctgcatctacaacctgttggatttcccacaatgctgatgcataagtaaatgttgtaccatcacacgtatttttatatgtgttatagtctggtatgacaaccattagtttggctgctgttgtaagaggtattatgttcaagggaacacaaccatctcttgcattgttgataatgttgttgagtgcatcattatccaactttctaagcatagtgaaaagcattgtctgcatagcactagtaacttttgccctcttgtcctcagatctagcctgtttatacatttgggtcatagcttgatcagccatcttttccaacttacgttgcatggctgcatcacggtcaaattcagatttagccacattcaaagacttcttcaactttttaagaacaacttcagaatcaccattagcaacagcctgctcataagcttcttgagcagtagcaaaagctgcatatgatggaagggaactaaactctgaggctatagcttgtaaggttgccctgttgtccagcatttcttcacaaagcttgtttatgtctacagcaccctgcatggaaagcaaaacagaaagtagtgaaaccattttttcaaaggcttcagtagtatctttagctaagagaatgtcattgtgtaactggacacattgagcccacaatttagatgatgattctactctgagttgttgcaaaactgagagtaagactactgatgtgcactttacatctgacattttagactgtacagtggctactttgatacaaggtttgccaccaacacccaacaatttaatgttgagtttgaaggcatctatgctattcttgggtgggagtagtccctgtgaattcatatatctaaactcctgtgtagaaactaagtaatcataaacaccaagagtcagtctaaagtagcggttgagtaaacaaaagaggccaaagtaacaagtacaaaaatagcctaagaaacaataaactagcattatacactgaagtgtattaccagttatgaagaaaatagggcaatactcaacacacataaaaacaatacctctggccaaaaacatgacagttgtaactacacctgagtagttagaagtaacagagattataagagcccacatggaaatggcttgatctaaagcattaccataataaactttataaacgagtgtcaagacattcataagtgtccacactctcctagcaccatcatcatacacagttcttgctgtcataaggattagtaacactacagctgatgcatacataacacagtcttttagcttaaaaccagacaaactagtatcaaccatatccaaccatgtcataatacgcatcacccaactagcaggcatatagaccatattaaaataagctacagtggcaagagaaggtaacaaaaacaaacagagaaatgcatgcttatgtttgacaaacatcattgcaaaagcagacatagcaataatacccatagcaaaaggtaaaaaggcattttcatacaaaaaaaagaacaaagaccattgagtactctggactaaaactaaaagtgaagtcaaaattgtgagtaacaaccagtggtgtgtacccttgattgttcttttcactgcactttggaaagtaacacctgagcattgtctaacaacatcaaaaggtgtaaattcatcttctaataaagcactacccaatatggtacgtccattcataccattttgcagtaattcttttaatgaagcacacatatctaaaacggcaattccagtttgagcagaaagaggtcctagtatgtcaacatggtcttgtgttagaggttcataattgtacttcatagccacaaggttaaagtcattaagagttgtggtaaatcgattgagaaaccacctgtctccatttataacagcagcgtacaaccaagctaaaacattaactgtaatagttgtgtccgtaccagctgcttgtgctgtttgcctgtcaacaaaaggtccataaaagttaccttctaagtctgtgccagcatgaactccagttggtaattccatatggtgcatgtaacaaaaagagacacagtcataatctatgttaaaaccaacactaccacatgaaccattaaggaatgaacccttaatagtgaaattgggcctcatagcacattggtaaacaccagatggtgaaccattgtaacaagctaacactgaaaaagtctgtcctggttgaatgcgaacaaacttatacttaggtgtcttaggattggctgtatcaaccttaagcttaagtacacaattttgcatagaatgtccaataaccctgagttgaacattaccagcctgtaccaagaaattatgattagacttacgaatgagtaaatcttcataattagggttaagcatgtcttcagaggtgcagatcacatgtcttggacagtaaactacgtcatcaagccaaagaccgttaagtgtagttgtaccacaagttacttgtaccatacaaccctcaactttaccagatgggaatgccatttttctaaaaccactctgcaaaacagctgaggtgatagaggtttgtggtggttggtaaagaacatcagaacctgagttactgaagtcattgagagcctttgcgagatgacaacaagcagcttctctgtagctagttgtatccattgctccactaaaatacttgtacttattataaagagctaagtatctattatattgcgtaagaggtaatagcacatcactacgcaactttagatacatttctttatttaacaaaaaggtgcacagcgcagcttcttcaaaagtactaaaggaaacaccattaaagactacacgtctctttaggtaattactaaagaaccaatagaaatgctttgtggaaatacaaatgatataagcaattgttatccagaaaggtactaaaggtgtgaacataaccatccactgaatatgtgctaaaaaagaaacatcattagtaagataaaatgtcaagtacaagtaaataacagaataaacaccaggtaagaatgagtaaactggtgttaaacagagtacagtgaatgacataaggaatagtaaagtattaaaggcaactacatgactgtattcaccaaaagctcttctaaacctcataaaatagtaggcaaggcatgttactacgatagctacaataccaccagctactatagatgctgatatgtccaaagcaccaataggttgaattagtggtgtaaacatattagtaagtaaatttacagcatctacaccacagaaaactcctggtaaagatctgtaataatcattgttaagtacccatctaccactagtagatacacaaacaccagcttctgatctttcacaagtgccgtgcctacagtactcagaatcaaaagttgttaccactctaacagaaccttcaaggtaggtgttaggaaattgaataatagagccatccatgagcacataacgtgtgtcagggcgtaaactttcataagcaacagaaccttctagtacattggtatcataacaatatggtactggcttaccagaagcatctttaaaaattgtacattcagcagccaaaacacaagctgatgttgcaaagtcagtgtactctataagttttgatggtgtgtaacagatgttaccaactgcactaaaaactctaggtaagaaatgcaaaaagtcaccattagttgtgcgtaatatcgtgccaggcaaaccaggcacgacaaaacccacttctcttgttatgactgcagcaatcaatgggcaagctttgtcattagtataactaccaccacgctggctaaaccatgtgtcaaaatcagcatgtttgttagcaaaacaagtatctgtagatgctatgtcacgagtgacaccaccatcaatagccttgtatcctatgatttcacttgaaaagtcagtatgtttagacatgacatgaacaggtgttattaaatagaaaatagcagcaacaaaaaggaacacaagtgtaactttaattaactgcttcaaccaattattaacaattttaccacccttaagtgctatctttgttgttacaacattaacaacttgtctagtagttgcacatgtcaacttaaaaggtaagttattctttttagcagcactacgtatttgttttcgtagttgttcagacaatgacatgaaatctttaacgttccatatcaaagcaatgttgtgactttttgctacctgcgcattaatatgacgcgcactacagtcaatacaagcaccaaggtcacggggtgtcatgttttcaactttgttataggtgagcatatagttattacaactatcgccagtaacttctatgtcagattgatgtgacaatttaagacattcaacaacatctttagtttctacatctgaatcaacaaacccttgccgagctgctgaaataaaagtagataagacattgtctaaggacacattctttgcaagttcagcttctgcagttgcaactagtgttttgagtttttccattggtacgttaaaagttgatgaaaacgtattaacgtaagcatcaaacattttaactgcaacttccgcactatcaccaacatcagacactaatgcctgatctagtaacagtataggttgacacataagctgactgtagtaaacagacgctgattttgcagatgattcttcacattttgatttaccatcaaaaactataacattaataggcaatgaacctttagtgttattagctctcaggttgtctaagttaacaaaatgagagagagaatgtctttcataagtcttttgaccagctttatcaaagtaaagatggatggaaccattcttcactgtaacactatcaacgatgtaagaagactggtcagtaggatttattggtcttttaaactgtagtgacaagtctctcgcaacttcatcactaataaatgtactaccagcacagaatgtatcacaattaacacaattccaattgtgtagtttgcaaaagcctttacctccattagcatagacataaaaggaccttctaacaccattaacaatagttgtacattcgactcttgttgctctattacgtttgtaacacatcatacaagttgatgaattacaaccgtctacaacatgcacataacttttccatacataataaaatgatgcaaagaagatgtacattctaaccatagctgaaatcggggccatttgtacaagattaattattaaccacataagccaagaattactaataaaatgtactgcaaaatagctgaaaaacaattgcatgattgcagccaatccaagtacatagaaaaacctagtgaaaagaatatatgccaaaaaccactctgcaactaagccaaaagcagttaaatcccatttaaaagatgaaatggtaatttgtatagtttctaaagaaggataggtgtctaaagaatctaaaccactaagacaaacactacaaggtatagaaccagtacagtaggttgcaatagtgacattagtagagttcaaatagccttctctgtaaccagtacagtaagaaggcatgcctaaattagacattaaaacacctaaagcagcggttgagtagattaaagaacctaggcaaacacttaatagtaaaaaccaaattataatatttatcagtttagaaaaattaggtgacttcaaataattaaatgaagcctctagacaaaatttaccgacactcttaacagtattctttgctatagtagtcggcatagatgctttaattctagaatttgtacttctagtaaaagtacacaattgtagcaataaagtaaagaaataaggcatataattagtacaaacacggtttaaacaccgtgtaactatgttagtagttgtactaacaactttgttaagaaaaggcttagcataattagctatagtatcccaagggacactattaacagcagctaaaccatgagtagcaagggttttcaaacctaatactctagataattcattaggtttcttaatagtaagactagaattgtctacataagcagccattagatctgtgtggccaacctcttctgtaatttttaaactattatttgctggtttaagtataatgtctcctacaacttcggtagttttcacattacactcaagaacgtctttctgtatggtaggattttccactacttcttcagagactggttttagatcttcgcaggcaagattatccattccctgcgcgtcctctgacttcagtacatcaaacgaatttgatgtttcaactggttttgtgctccaaagacaacgtatacaccaggtatttggtttatacgtggctttattagttgcattgttaacatgccaaacaataggtttatgtaacaatttagctcctttcttaaaagagggtgtgtagtgtttataatcaatagccaccacatcaccatttaagtcagggaaaaatgtaactttaagctctcttgaagcaggtttcttataaccagttaactggtttaaatcatcagcaaatttgatattatcacatacaaacttaaaattatcgaagcttgcgtttggatatggttggtttggtacaagatcaattggttgctctgtgaaataagaattgtctttcttataataattgtccaacttagggtcaatttctgtacaaacaacaccatccaatttataagtaactggttttatggttgttgtgtaactgttttctttgtagaaaacatccgtaataggacctttgtattctgaggactttgtaagtaaagcaccgtctatgcaatacaaagtttctttagaagttatatgtttatagtgaccacactggtaattaccagtgtactcactagcacaagtaaatgtaccatgcttaagttcatactgagcaggtggtgctgacatcataacaaaaggtgactcctgttgtactagatattttgtagcttgtttaccacacgtacaaggtatctgaacacctttcttaaattgttcataagaaagtgtgcccatgtacataacagcttctacacccttaagggttgtctgctgttgtccacaagttttacacaccacgttcaagactcttttgcaagaatctaaattggcatgttgaaacaagtaactcattgtttctctaacatcacctaactcacctactgtcttattacagtaggctaagataagtgcacaaaagttagcagcttcaccagcccttgctctgtaataagcatcttgtagagcaggtggattaaacttcaactctatttgttggagtgttaacaatgcagtggcaagataacagttgttatctgcccatttaatagaagttaaaccattaacttgtgggtatttccactttttagtgtgatttaatgctgacatgtacctacccagaaaactaggatcagttgtgtggtagtactcaaaagcctcaacacgtagagtgtcatcattaggtaaaacataaaatgttttaccttcatgtgaattatgaggttttattttagtaacatcagctccatccaaataagttggaccaaactgttgtccatatgtcattgacatgtccacaacttgcgtgtggaggttaatgttgtctactgttgtaaacaccttaatagtcctcacttctctcaaagaaagaagtgtcttaagattgtcaaaggtgataacttcaccatctaggtggaatgtggtaggattactagtgtaatatacacttttatcacctctcttaagaaattctatacctagttgtgtagattgtccagaataggaccaatctttataggaaccagcaagtgagatggtttcaataaaatgttcttcaggtgttttagaagaagaagtaagataaccattatacgctgtaacagcatcaggtgaagaaacagaaactgtagctggcactttgagagatctcatataccgagcagcttcttccaaatttaagccatgtgttacatagccaagtggcattgtaacaagagtttcatttagatcgttaagtgtgttgataagtgacgctacagttgttttactggtgtaaaagtaaaatctagcaccataatcaaccacaccctcttgtattttaatacccttatatttacgctgtatagttgaaactatggctttagtttccacacagacaggcattaatttgcgtgtttcttctgcatgtgcaagcatttctcgcaaattccaagaaacagttccaagaatttcttgcttctcattagagataatagatggtagaatgtaaaaggcacttttacactttttaagcactgtctttgcctcctctacagtgtaaccatttaaaccctgacccgggtaagtggttatataattgtctgttggcacttttctcaaagctttcgctagcatttcagtagtgccaccagcctttttagtaggtataaccacagcagttaaaacaccctcttgaacaacatcacccactatatatggagcatctttctttaagaaagtgatgtcaatgtcactaacaagagtggcagaatctggatgaagattgccattaatgtcaatataaagtaacaagttttctgtgaggaacttagtttcttccagagttgttgtaacttcttcaacacaagctttgattttcttatcatcttgttttctctgttcaactgaaggtttactttcagttataaatggcttaacttcctctttaggaatctcagcgatcttttgttcaacttgcttttcactcttcatttccaaaaagcttgaaacaagtttgtcatagagatttttatcaaagacagctaagtagacatttgtgcgaacagtatctacacaaactcttaaagaatgtatagggtcagcaccaaaaataccagctgataataatggtgcaagtagaacttcgtgctgattaaaattttcataagcactcttaagaagttgaatgtcttcacctttgttaacatttgggccgacaacatgaagacagtgtttagcaagattgtgtccgcttaaaacacaactaccacccactttaagtggtccattagtagctatgtaatcatcagattcaacttgcatggcattgttagtagccttatttaaggctcctgcaacacctcctccatgtttaaggtaaacattggctgcattaacaaccactgttggttttacctttttagcttcttccacaatgtctgcatttttaatgtatacattgtcagtaagttttaaataaccactaaaactattcacttcaatagtctgaacaactggtgtaagttccatctctaattgaggttgaacctcaacaattgtttgaatagtagttgtctgattgtcctcactgccgtcttgttgaccaacagtttgttgactatcatcatctaaccaatcttcttcttgctcttcttcaggttgaagagcagcagaagtggcaccaaattccaaaggtttaccttggtaatcatcttcagtaccatactcatattgagttgatggctcaaactcttcttcttcacaatcaccttcttcttcatcctcatctggagggtagaaagaacaatacatatgtgaagccaatttaaactcaccagactcatcaaataagtagtatgtagccatactccactcatctaaatcaatgcccagtggtgtaagtaattcagatactggttgcaaagtttttatgacagcatctgccacaacacaggcgaactcatttacttctgtaccgagttcaactgtataggcagagcacttctcattaagtactttatcaatcctttcatcaagttcaaaagtgatattcacactcttgtaaccttgcacttctatcacagtgtcatcaccaaaagtaacctttgttggtgcaccgcctttgagtgtgaaggtattgtttgttaccatcatattaggtgcaagggcacagtacttttctgtgtctttgatttcgagcaacataagcccgttaatacaaactggtgtaccaaccaatggagcttcaacagcttcactagtaggttgttctaatggttgtaaatcaccagttttcaagacaacttcctctgttaacacttctgtgggaagtgtttctccctctaagaagataatttcttttggggcttttagaggcatgagtaggccagtttcttctctggatttaacacactttctgtacaatccctttgagtgcgtgacaaatgtttcacctaaattcaaggctttaagtttagctccaccaataatgatagagtcagcacacaaagccaaaaatttatttacaagcttaaagaatgtctgaacactctccttaatttcctttgcacaggtgacaatttgtccaccgacaatttcacaagcacaggttgagataaatttaacaatttcccaaccgtctctaagaaactctacaccttccttaaacttctcttcaagccaatcaaggacgggtttgagtttttcataaacagtgccaaagatgttagttagccactgcgaagtcaactgaacaacaccacctgtaatgtaggccattacaactagattgttagtagccaaatcagatgtgaacatcatagcatcaatgagtctcagtgaatactgtgaaattccatctagtattgttatagcggccttctgtaaaacacgcacagaattttgagcagtttcaagagtgcgggagaaaattgatcgtacaacacgagcagcctctgatgcaaatgcataaagaggactcagtattgatttctgttcaccaatattccaggcaccttttttagcttttccttttgtaactttaaaattaccacaggattcaacaatttgtttgaatgctttataatccaaacctttcacagtttccacaaaagcacttgtggaagcagaaaaagatgccaaaataatggcgatctcttcattaagtttaaagtcaccaacaatattgatgttgactttctctttttggagtatttcaagaaggttgtcattaagaccttcggaaccttctccaacaacacctgtatggttacaacctatgttagcgctagcacgtggaacccaataggcacacttgttatggcaaccaacataagagaacacacagcctccaaaggcaatagtgcgaccacccttacgaagaatggttttcaagccagattcattatggtattcggcaagactatgctcaggtcctacttctgaattgtgacatgctggacaataaattttaacaacagcattttggggtaagtaaccacaagtagtggcaccttctttagtcaaattctcagtgccacaaaattcgcaagtggctttaacaaaatcgcccgtctgccatgaagtttcaccacaatgatcacacttcatgagagttgaaaggcacatttggttgcattcatttggtgacgcaactggatagacagatcgaattctacccataaagccatcaagctttttcttttcaacccttggttgaatagtcttgattatggaatttaagggaaatacaaaatttggacattccccattgaaggtgtcaaatttctttgccaatttaatttcaaaaggtgtctgcaattcatagctcttttcagaacgttccgtgtaccaagcaatttcatgctcatgttcacggcagcagtatacacccctcttagtgtcaataaagtccagttgttcggacaaagtgcatgaagctttaccagcacgtgctagaaggtctttaatgcactcaagagggtagccatcagggccacagaagttgttatcgacatagcgagtgtatgcccctccgttaagctcacgcatgagttcacgggtaacaccactgctatgtttagtgttccagttttcttgaaaatcttcataaggatcagtgccaagctcgtcgcctaagtcaaatgactttagatcggcgccgtaactatggccaccagctcctttattaccgttcttacgaagaagaaccttgcggtaagccactggtatttcgcccacatgagggacaaggacaccaagtgtctcaccactacgaccgtactgaatgccttcgagttctgctaccagctcaaccataacatgaccatgaggtgcagttcgagcatccgaacgtttgatgaacacatagggctgttcaagttgaggcaaaacgcctttttcaacttctactaagccacaagtgccatctttaagatgttgacgtgcctctgataagacctcctccacggagtctccaaagccacgtacgagcacgtcgcgaacctgtaaaacaggcaaactgagttggacgtgtgttttctcgttgaaaccagggacaaggctctccatcttacctttcggtcacacccggacgaaacctagatgtgctgatgatcggctgcaacacggacgaaaccgtaagcagcctgcagaagatagacgagttactcgtgtcctgtcaacgacagtaattagttattaattatactgcgtgagtgcactaagcatgcagccgagtgacagccacacagattttaaagttcgtttagagaacagatctacaagagatcgaaagttggttggtttgttacctgggaaggtataaacctttaat

SEQ ID NO: 6 - RNA, 29903 nt, Severe acute respiratory syndrome coronavirus 2
  source 1..29903: mol_type = unassigned RNA
attaaaggtttataccttcccaggtaacaaaccaaccaactttcgatctcttgtagatctgttctctaaacgaactttaaaatctgtgtggctgtcactcggctgcatgcttagtgcactcacgcagtataattaataactaattactgtcgttgacaggacacgagtaactcgtctatcttctgcaggctgcttacggtttcgtccgtgttgcagccgatcatcagcacatctaggtttcgtccgggtgtgaccgaaaggtaagatggagagccttgtccctggtttcaacgagaaaacacacgtccaactcagtttgcctgttttacaggttcgcgacgtgctcgtacgtggctttggagactccgtggaggaggtcttatcagaggcacgtcaacatcttaaagatggcacttgtggcttagtagaagttgaaaaaggcgttttgcctcaacttgaacagccctatgtgttcatcaaacgttcggatgctcgaactgcacctcatggtcatgttatggttgagctggtagcagaactcgaaggcattcagtacggtcgtagtggtgagacacttggtgtccttgtccctcatgtgggcgaaataccagtggcttaccgcaaggttcttcttcgtaagaacggtaataaaggagctggtggccatagttacggcgccgatctaaagtcatttgacttaggcgacgagcttggcactgatccttatgaagattttcaagaaaactggaacactaaacatagcagtggtgttacccgtgaactcatgcgtgagcttaacggaggggcatacactcgctatgtcgataacaacttctgtggccctgatggctaccctcttgagtgcattaaagaccttctagcacgtgctggtaaagcttcatgcactttgtccgaacaactggactttattgacactaagaggggtgtatactgctgccgtgaacatgagcatgaaattgcttggtacacggaacgttctgaaaagagctatgaattgcagacaccttttgaaattaaattggcaaagaaatttgacaccttcaatggggaatgtccaaattttgtatttcccttaaattccataatcaagactattcaaccaagggttgaaaagaaaaagcttgatggctttatgggtagaattcgatctgtctatccagttgcgtcaccaaatgaatgcaaccaaatgtgcctttcaactctcatgaagtgtgatcattgtggtgaaacttcatggcagacgggcgattttgttaaagccacttgcgaattttgtggcactgagaatttgactaaagaaggtgccactacttgtggttacttaccccaaaatgctgttgttaaaatttattgtccagcatgtcacaattcagaagtaggacctgagcatagtcttgccgaataccataatgaatctggcttgaaaaccattcttcgtaagggtggtcgcactattgcctttggaggctgtgtgttctcttatgttggttgccataacaagtgtgcctattgggttccacgtgctagcgctaacataggttgtaaccatacaggtgttgttggagaaggttccgaaggtcttaatgacaaccttcttgaaatactccaaaaagagaaagtcaacatcaatattgttggtgactttaaacttaatgaagagatcgccattattttggcatctttttctgcttccacaagtgcttttgtggaaactgtgaaaggtttggattataaagcattcaaacaaattgttgaatcctgtggtaattttaaagttacaaaaggaaaagctaaaaaaggtgcctggaatattggtgaacagaaatcaatactgagtcctctttatgcatttgcatcagaggctgctcgtgttgtacgatcaattttctcccgcactcttgaaactgctcaaaattctgtgcgtgttttacagaaggccgctataacaatactagatggaatttcacagtattcactgagactcattgatgctatgatgttcacatctgatttggctactaacaatctagttgtaatggcctacattacaggtggtgttgttcagttgacttcgcagtggctaactaacatctttggcactgtttatgaaaaactcaaacccgtccttgattggcttgaagagaagtttaaggaaggtgtagagtttcttagagacggttgggaaattgttaaatttatctcaacctgtgcttgtgaaattgtcggtggacaaattgtcacctgtgcaaaggaaattaaggagagtgttcagacattctttaagcttgtaaataaatttttggctttgtgtgctgactctatcattattggtggagctaaacttaaagccttgaatttaggtgaaacatttgtcacgcactcaaagggattgtacagaaagtgtgttaaatccagagaagaaactggcctactcatgcctctaaaagccccaaaagaaattatcttcttagagggagaaacacttcccacagaagtgttaacagaggaagttgtcttgaaaactggtgatttacaaccattagaacaacctactagtgaagctgttgaagctccattggttggtacaccagtttgtattaacgggcttatgttgctcgaaatcaaagacacagaaaagtactgtgcccttgcacctaatatgatggtaacaaacaataccttcacactcaaaggcggtgcaccaacaaaggttacttttggtgatgacactgtgatagaagtgcaaggttacaagagtgtgaatatcacttttgaacttgatgaaaggattgataaagtacttaatgagaagtgctctgcctatacagttgaactcggtacagaagtaaatgagttcgcctgtgttgtggcagatgctgtcataaaaactttgcaaccagtatctgaattacttacaccactgggcattgatttagatgagtggagtatggctacatactacttatttgatgagtctggtgagtttaaattggcttcacatatgtattgttctttctaccctccagatgaggatgaagaagaaggtgattgtgaagaagaagagtttgagccatcaactcaatatgagtatggtactgaagatgattaccaaggtaaacctttggaatttggtgccacttctgctgctcttcaacctgaagaagagcaagaagaagattggttagatgatgatagtcaacaaactgttggtcaacaagacggcagtgaggacaatcagacaactactattcaaacaattgttgaggttcaacctcaattagagatggaacttacaccagttgttcagactattgaagtgaatagttttagtggttatttaaaacttactgacaatgtatacattaaaaatgcagacattgtggaagaagctaaaaaggtaaaaccaacagtggttgttaatgcagccaatgtttaccttaaacatggaggaggtgttgcaggagccttaaataaggctactaacaatgccatgcaagttgaatctgatgattacatagctactaatggaccacttaaagtgggtggtagttgtgttttaagcggacacaatcttgctaaacactgtcttcatgttgtcggcccaaatgttaacaaaggtgaagacattcaacttcttaagagtgcttatgaaaattttaatcagcacgaagttctacttgcaccattattatcagctggtatttttggtgctgaccctatacattctttaagagtttgtgtagatactgttcgcacaaatgtctacttagctgtctttgataaaaatctctatgacaaacttgtttcaagctttttggaaatgaagagtgaaaagcaagttgaacaaaagatcgctgagattcctaaagaggaagttaagccatttataactgaaagtaaaccttcagttgaacagagaaaacaagatgataagaaaatcaaagcttgtgttgaagaagttacaacaactctggaagaaactaagttcctcacagaaaacttgttactttatattgacattaatggcaatcttcatccagattctgccactcttgttagtgacattgacatcactttcttaaagaaagatgctccatatatagtgggtgatgttgttcaagagggtgttttaactgctgtggttatacctactaaaaaggctggtggcactactgaaatgctagcgaaagctttgagaaaagtgccaacagacaattatataaccacttacccgggtcagggtttaaatggttacactgtagaggaggcaaagacagtgcttaaaaagtgtaaaagtgccttttacattctaccatctattatctctaatgagaagcaagaaattcttggaactgtttcttggaatttgcgagaaatgcttgcacatgcagaagaaacacgcaaattaatgcctgtctgtgtggaaactaaagccatagtttcaactatacagcgtaaatataagggtattaaaatacaagagggtgtggttgattatggtgctagattttacttttacaccagtaaaacaactgtagcgtcacttatcaacacacttaacgatctaaatgaaactcttgttacaatgccacttggctatgtaacacatggcttaaatttggaagaagctgctcggtatatgagatctctcaaagtgccagctacagtttctgtttcttcacctgatgctgttacagcgtataatggttatcttacttcttcttctaaaacacctgaagaacattttattgaaaccatctcacttgctggttcctataaagattggtcctattctggacaatctacacaactaggtatagaatttcttaagagaggtgataaaagtgtatattacactagtaatcctaccacattccacctagatggtgaagttatcacctttgacaatcttaagacacttctttctttgagagaagtgaggactattaaggtgtttacaacagtagacaacattaacctccacacgcaagttgtggacatgtcaatgacatatggacaacagtttggtccaacttatttggatggagctgatgttactaaaataaaacctcataattcacatgaaggtaaaacattttatgttttacctaatgatgacactctacgtgttgaggcttttgagtactaccacacaactgatcctagttttctgggtaggtacatgtcagcattaaatcacactaaaaagtggaaatacccacaagttaatggtttaacttctattaaatgggcagataacaactgttatcttgccactgcattgttaacactccaacaaatagagttgaagtttaatccacctgctctacaagatgcttattacagagcaagggctggtgaagctgctaacttttgtgcacttatcttagcctactgtaataagacagtaggtgagttaggtgatgttagagaaacaatgagttacttgtttcaacatgccaatttagattcttgcaaaagagtcttgaacgtggtgtgtaaaacttgtggacaacagcagacaacccttaagggtgtagaagctgttatgtacatgggcacactttcttatgaacaatttaagaaaggtgttcagataccttgtacgtgtggtaaacaagctacaaaatatctagtacaacaggagtcaccttttgttatgatgtcagcaccacctgctcagtatgaacttaagcatggtacatttacttgtgctagtgagtacactggtaattaccagtgtggtcactataaacatataacttctaaagaaactttgtattgcatagacggtgctttacttacaaagtcctcagaatacaaaggtcctattacggatgttttctacaaagaaaacagttacacaacaaccataaaaccagttacttataaattggatggtgttgtttgtacagaaattgaccctaagttggacaattattataagaaagacaattcttatttcacagagcaaccaattgatcttgtaccaaaccaaccatatccaaacgcaagcttcgataattttaagtttgtatgtgataatatcaaatttgctgatgatttaaaccagttaactggttataagaaacctgcttcaagagagcttaaagttacatttttccctgacttaaatggtgatgtggtggctattgattataaacactacacaccctcttttaagaaaggagctaaattgttacataaacctattgtttggcatgttaacaatgcaactaataaagccacgtataaaccaaatacctggtgtatacgttgtctttggagcacaaaaccagttgaaacatcaaattcgtttgatgtactgaagtcagaggacgcgcagggaatggataatcttgcctgcgaagatctaaaaccagtctctgaagaagtagtggaaaatcctaccatacagaaagacgttcttgagtgtaatgtgaaaactaccgaagttgtaggagacattatacttaaaccagcaaataatagtttaaaaattacagaagaggttggccacacagatctaatggctgcttatgtagacaattctagtcttactattaagaaacctaatgaattatctagagtattaggtttgaaaacccttgctactcatggtttagctgctgttaatagtgtcccttgggatactatagctaattatgctaagccttttcttaacaaagttgttagtacaactactaacatagttacacggtgtttaaaccgtgtttgtactaattatatgccttatttctttactttattgctacaattgtgtacttttactagaagtacaaattctagaattaaagcatctatgccgactactatagcaaagaatactgttaagagtgtcggtaaattttgtctagaggcttcatttaattatttgaagtcacctaatttttctaaactgataaatattataatttggtttttactattaagtgtttgcctaggttctttaatctactcaaccgctgctttaggtgttttaatgtctaatttaggcatgccttcttactgtactggttacagagaaggctatttgaactctactaatgtcactattgcaacctactgtactggttctataccttgtagtgtttgtcttagtggtttagattctttagacacctatccttctttagaaactatacaaattaccatttcatcttttaaatgggatttaactgcttttggcttagttgcagagtggtttttggcatatattcttttcactaggtttttctatgtacttggattggctgcaatcatgcaattgtttttcagctattttgcagtacattttattagtaattcttggcttatgtggttaataattaatcttgtacaaatggccccgatttcagctatggttagaatgtacatcttctttgcatcattttattatgtatggaaaagttatgtgcatgttgtagacggttgtaattcatcaacttgtatgatgtgttacaaacgtaatagagcaacaagagtcgaatgtacaactattgttaatggtgttagaaggtccttttatgtctatgctaatggaggtaaaggcttttgcaaactacacaattggaattgtgttaattgtgatacattctgtgctggtagtacatttattagtgatgaagttgcgagagacttgtcactacagtttaaaagaccaataaatcctactgaccagtcttcttacatcgttgatagtgttacagtgaagaatggttccatccatctttactttgataaagctggtcaaaagacttatgaaagacattctctctctcattttgttaacttagacaacctgagagctaataacactaaaggttcattgcctattaatgttatagtttttgatggtaaatcaaaatgtgaagaatcatctgcaaaatcagcgtctgtttactacagtcagcttatgtgtcaacctatactgttactagatcaggcattagtgtctgatgttggtgatagtgcggaagttgcagttaaaatgtttgatgcttacgttaatacgttttcatcaacttttaacgtaccaatggaaaaactcaaaacactagttgcaactgcagaagctgaacttgcaaagaatgtgtccttagacaatgtcttatctacttttatttcagcagctcggcaagggtttgttgattcagatgtagaaactaaagatgttgttgaatgtcttaaattgtcacatcaatctgacatagaagttactggcgatagttgtaataactatatgctcacctataacaaagttgaaaacatgacaccccgtgaccttggtgcttgtattgactgtagtgcgcgtcatattaatgcgcaggtagcaaaaagtcacaacattgctttgatatggaacgttaaagatttcatgtcattgtctgaacaactacgaaaacaaatacgtagtgctgctaaaaagaataacttaccttttaagttgacatgtgcaactactagacaagttgttaatgttgtaacaacaaagatagcacttaagggtggtaaaattgttaataattggttgaagcagttaattaaagttacacttgtgttcctttttgttgctgctattttctatttaataacacctgttcatgtcatgtctaaacatactgacttttcaagtgaaatcataggatacaaggctattgatggtggtgtcactcgtgacatagcatctacagatacttgttttgctaacaaacatgctgattttgacacatggtttagccagcgtggtggtagttatactaatgacaaagcttgcccattgattgctgcagtcataacaagagaagtgggttttgtcgtgcctggtttgcctggcacgatattacgcacaactaatggtgactttttgcatttcttacctagagtttttagtgcagttggtaacatctgttacacaccatcaaaacttatagagtacactgactttgcaacatcagcttgtgttttggctgctgaatgtacaatttttaaagatgcttctggtaagccagtaccatattgttatgataccaatgtactagaaggttctgttgcttatgaaagtttacgccctgacacacgttatgtgctcatggatggctctattattcaatttcctaacacctaccttgaaggttctgttagagtggtaacaacttttgattctgagtactgtaggcacggcacttgtgaaagatcagaagctggtgtttgtgtatctactagtggtagatgggtacttaacaatgattattacagatctttaccaggagttttctgtggtgtagatgctgtaaatttacttactaatatgtttacaccactaattcaacctattggtgctttggacatatcagcatctatagtagctggtggtattgtagctatcgtagtaacatgccttgcctactattttatgaggtttagaagagcttttggtgaatacagtcatgtagttgcctttaatactttactattccttatgtcattcactgtactctgtttaacaccagtttactcattcttacctggtgtttattctgttatttacttgtacttgacattttatcttactaatgatgtttcttttttagcacatattcagtggatggttatgttcacacctttagtacctttctggataacaattgcttatatcatttgtatttccacaaagcatttctattggttctttagtaattacctaaagagacgtgtagtctttaatggtgtttcctttagtacttttgaagaagctgcgctgtgcacctttttgttaaataaagaaatgtatctaaagttgcgtagtgatgtgctattacctcttacgcaatataatagatacttagctctttataataagtacaagtattttagtggagcaatggatacaactagctacagagaagctgcttgttgtcatctcgcaaaggctctcaatgacttcagtaactcaggttctgatgttctttaccaaccaccacaaacctctatcacctcagctgttttgcagagtggttttagaaaaatggcattcccatctggtaaagttgagggttgtatggtacaagtaacttgtggtacaactacacttaacggtctttggcttgatgacgtagtttactgtccaagacatgtgatctgcacctctgaagacatgcttaaccctaattatgaagatttactcattcgtaagtctaatcataatttcttggtacaggctggtaatgttcaactcagggttattggacattctatgcaaaattgtgtacttaagcttaaggttgatacagccaatcctaagacacctaagtataagtttgttcgcattcaaccaggacagactttttcagtgttagcttgttacaatggttcaccatctggtgtttaccaatgtgctatgaggcccaatttcactattaagggttcattccttaatggttcatgtggtagtgttggttttaacatagattatgactgtgtctctttttgttacatgcaccatatggaattaccaactggagttcatgctggcacagacttagaaggtaacttttatggaccttttgttgacaggcaaacagcacaagcagctggtacggacacaactattacagttaatgttttagcttggttgtacgctgctgttataaatggagacaggtggtttctcaatcgatttaccacaactcttaatgactttaaccttgtggctatgaagtacaattatgaacctctaacacaagaccatgttgacatactaggacctctttctgctcaaactggaattgccgttttagatatgtgtgcttcattaaaagaattactgcaaaatggtatgaatggacgtaccatattgggtagtgctttattagaagatgaatttacaccttttgatgttgttagacaatgctcaggtgttactttccaaagtgcagtgaaaagaacaatcaagggtacacaccactggttgttactcacaattttgacttcacttttagttttagtccagagtactcaatggtctttgttcttttttttgtatgaaaatgcctttttaccttttgctatgggtattattgctatgtctgcttttgcaatgatgtttgtcaaacataagcatgcatttctctgtttgtttttgttaccttctcttgccactgtagcttattttaatatggtctatatgcctgctagttgggtgatgcgtattatgacatggttggatatggttgatactagtttgtctggttttaagctaaaagactgtgttatgtatgcatcagctgtagtgttactaatccttatgacagcaagaactgtgtatgatgatggtgctaggagagtgtggacacttatgaatgtcttgacactcgtttataaagtttattatggtaatgctttagatcaagccatttccatgtgggctcttataatctctgttacttctaactactcaggtgtagttacaactgtcatgtttttggccagaggtattgtttttatgtgtgttgagtattgccctattttcttcataactggtaatacacttcagtgtataatgctagtttattgtttcttaggctatttttgtacttgttactttggcctcttttgtttactcaaccgctactttagactgactcttggtgtttatgattacttagtttctacacaggagtttagatatatgaattcacagggactactcccacccaagaatagcatagatgccttcaaactcaacattaaattgttgggtgttggtggcaaaccttgtatcaaagtagccactgtacagtctaaaatgtcagatgtaaagtgcacatcagtagtcttactctcagttttgcaacaactcagagtagaatcatcatctaaattgtgggctcaatgtgtccagttacacaatgacattctcttagctaaagatactactgaagcctttgaaaaaatggtttcactactttctgttttgctttccatgcagggtgctgtagacataaacaagctttgtgaagaaatgctggacaacagggcaaccttacaagctatagcctcagagtttagttcccttccatcatatgcagcttttgctactgctcaagaagcttatgagcaggctgttgctaatggtgattctgaagttgttcttaaaaagttgaagaagtctttgaatgtggctaaatctgaatttgaccgtgatgcagccatgcaacgtaagttggaaaagatggctgatcaagctatgacccaaatgtataaacaggctagatctgaggacaagagggcaaaagttactagtgctatgcagacaatgcttttcactatgcttagaaagttggataatgatgcactcaacaacattatcaacaatgcaagagatggttgtgttcccttgaacataatacctcttacaacagcagccaaactaatggttgtcataccagactataacacatataaaaatacgtgtgatggtacaacatttacttatgcatcagcattgtgggaaatccaacaggttgtagatgcagatagtaaaattgttcaacttagtgaaattagtatggacaattcacctaatttagcatggcctcttattgtaacagctttaagggccaattctgctgtcaaattacagaataatgagcttagtcctgttgcactacgacagatgtcttgtgctgccggtactacacaaactgcttgcactgatgacaatgcgttagcttactacaacacaacaaagggaggtaggtttgtacttgcactgttatccgatttacaggatttgaaatgggctagattccctaagagtgatggaactggtactatctatacagaactggaaccaccttgtaggtttgttacagacacacctaaaggtcctaaagtgaagtatttatactttattaaaggattaaacaacctaaatagaggtatggtacttggtagtttagctgccacagtacgtctacaagctggtaatgcaacagaagtgcctgccaattcaactgtattatctttctgtgcttttgctgtagatgctgctaaagcttacaaagattatctagctagtgggggacaaccaatcactaattgtgttaagatgttgtgtacacacactggtactggtcaggcaataacagttacaccggaagccaatatggatcaagaatcctttggtggtgcatcgtgttgtctgtactgccgttgccacatagatcatccaaatcctaaaggattttgtgacttaaaaggtaagtatgtacaaatacctacaacttgtgctaatgaccctgtgggttttacacttaaaaacacagtctgtaccgtctgcggtatgtggaaaggttatggctgtagttgtgatcaactccgcgaacccatgcttcagtcagctgatgcacaatcgtttttaaacgggtttgcggtgtaagtgcagcccgtcttacaccgtgcggcacaggcactagtactgatgtcgtatacagggcttttgacatctacaatgataaagtagctggttttgctaaattcctaaaaactaattgttgtcgcttccaagaaaaggacgaagatgacaatttaattgattcttactttgtagttaagagacacactttctctaactaccaacatgaagaaacaatttataatttacttaaggattgtccagctgttgctaaacatgacttctttaagtttagaatagacggtgacatggtaccacatatatcacgtcaacgtcttactaaatacacaatggcagacctcgtctatgctttaaggcattttgatgaaggtaattgtgacacattaaaagaaatacttgtcacatacaattgttgtgatgatgattatttcaataaaaaggactggtatgattttgtagaaaacccagatatattacgcgtatacgccaacttaggtgaacgtgtacgccaagctttgttaaaaacagtacaattctgtgatgccatgcgaaatgctggtattgttggtgtactgacattagataatcaagatctcaatggtaactggtatgatttcggtgatttcatacaaaccacgccaggtagtggagttcctgttgtagattcttattattcattgttaatgcctatattaaccttgaccagggctttaactgcagagtcacatgttgacactgacttaacaaagccttacattaagtgggatttgttaaaatatgacttcacggaagagaggttaaaactctttgaccgttattttaaatattgggatcagacataccacccaaattgtgttaactgtttggatgacagatgcattctgcattgtgcaaactttaatgttttattctctacagtgttcccacctacaagttttggaccactagtgagaaaaatatttgttgatggtgttccatttgtagtttcaactggataccacttcagagagctaggtgttgtacataatcaggatgtaaacttacatagctctagacttagttttaaggaattacttgtgtatgctgctgaccctgctatgcacgctgcttctggtaatctattactagataaacgcactacgtgcttttcagtagctgcacttactaacaatgttgcttttcaaactgtcaaacccggtaattttaacaaagacttctatgactttgctgtgtctaagggtttctttaaggaaggaagttctgttgaattaaaacacttcttctttgctcaggatggtaatgctgctatcagcgattatgactactatcgttataatctaccaacaatgtgtgatatcagacaactactatttgtagttgaagttgttgataagtactttgattgttacgatggtggctgtattaatgctaaccaagtcatcgtcaacaacctagacaaatcagctggttttccatttaataaatggggtaaggctagactttattatgattcaatgagttatgaggatcaagatgcacttttcgcatatacaaaacgtaatgtcatccctactataactcaaatgaatcttaagtatgccattagtgcaaagaatagagctcgcaccgtagctggtgtctctatctgtagtactatgaccaatagacagtttcatcaaaaattattgaaatcaatagccgccactagaggagctactgtagtaattggaacaagcaaattctatggtggttggcacaacatgttaaaaactgtttatagtgatgtagaaaaccctcaccttatgggttgggattatcctaaatgtgatagagccatgcctaacatgcttagaattatggcctcacttgttcttgctcgcaaacatacaacgtgttgtagcttgtcacaccgtttctatagattagctaatgagtgtgctcaagtattgagtgaaatggtcatgtgtggcggttcactatatgttaaaccaggtggaacctcatcaggagatgccacaactgcttatgctaatagtgtttttaacatttgtcaagctgtcacggccaatgttaatgcacttttatctactgatggtaacaaaattgccgataagtatgtccgcaatttacaacacagactttatgagtgtctctatagaaatagagatgttgacacagactttgtgaatgagttttacgcatatttgcgtaaacatttctcaatgatgatactctctgacgatgctgttgtgtgtttcaatagcacttatgcatctcaaggtctagtggctagcataaagaactttaagtcagttctttattatcaaaacaatgtttttatgtctgaagcaaaatgttggactgagactgaccttactaaaggacctcatgaattttgctctcaacatacaatgctagttaaacagggtgatgattatgtgtaccttccttacccagatccatcaagaatcctaggggccggctgttttgtagatgatatcgtaaaaacagatggtacacttatgattgaacggttcgtgtctttagctatagatgcttacccacttactaaacatcctaatcaggagtatgctgatgtctttcatttgtacttacaatacataagaaagctacatgatgagttaacaggacacatgttagacatgtattctgttatgcttactaatgataacacttcaaggtattgggaacctgagttttatgaggctatgtacacaccgcatacagtcttacaggctgttggggcttgtgttctttgcaattcacagacttcattaagatgtggtgcttgcatacgtagaccattcttatgttgtaaatgctgttacgaccatgtcatatcaacatcacataaattagtcttgtctgttaatccgtatgtttgcaatgctccaggttgtgatgtcacagatgtgactcaactttacttaggaggtatgagctattattgtaaatcacataaaccacccattagttttccattgtgtgctaatggacaagtttttggtttatataaaaatacatgtgttggtagcgataatgttactgactttaatgcaattgcaacatgtgactggacaaatgctggtgattacattttagctaacacctgtactgaaagactcaagctttttgcagcagaaacgctcaaagctactgaggagacatttaaactgtcttatggtattgctactgtacgtgaagtgctgtctgacagagaattacatctttcatgggaagttggtaaacctagaccaccacttaaccgaaattatgtctttactggttatcgtgtaactaaaaacagtaaagtacaaataggagagtacacctttgaaaaaggtgactatggtgatgctgttgtttaccgaggtacaacaacttacaaattaaatgttggtgattattttgtgctgacatcacatacagtaatgccattaagtgcacctacactagtgccacaagagcactatgttagaattactggcttatacccaacactcaatatctcagatgagttttctagcaatgttgcaaattatcaaaaggttggtatgcaaaagtattctacactccagggaccacctggtactggtaagagtcattttgctattggcctagctctctactacccttctgctcgcatagtgtatacagcttgctctcatgccgctgttgatgcactatgtgagaaggcattaaaatatttgcctatagataaatgtagtagaattatacctgcacgtgctcgtgtagagtgttttgataaattcaaagtgaattcaacattagaacagtatgtcttttgtactgtaaatgcattgcctgagacgacagcagatatagttgtctttgatgaaatttcaatggccacaaattatgatttgagtgttgtcaatgccagattacgtgctaagcactatgtgtacattggcgaccctgctcaattacctgcaccacgcacattgctaactaagggcacactagaaccagaatatttcaattcagtgtgtagacttatgaaaactataggtccagacatgttcctcggaacttgtcggcgttgtcctgctgaaattgttgacactgtgagtgctttggtttatgataataagcttaaagcacataaagacaaatcagctcaatgctttaaaatgttttataagggtgttatcacgcatgatgtttcatctgcaattaacaggccacaaataggcgtggtaagagaattccttacacgtaaccctgcttggagaaaagctgtctttatttcaccttataattcacagaatgctgtagcctcaaagattttgggactaccaactcaaactgttgattcatcacagggctcagaatatgactatgtcatattcactcaaaccactgaaacagctcactcttgtaatgtaaacagatttaatgttgctattaccagagcaaaagtaggcatactttgcataatgtctgatagagacctttatgacaagttgcaatttacaagtcttgaaattccacgtaggaatgtggcaactttacaagctgaaaatgtaacaggactctttaaagattgtagtaaggtaatcactgggttacatcctacacaggcacctacacacctcagtgttgacactaaattcaaaactgaaggtttatgtgttgacatacctggcatacctaaggacatgacctatagaagactcatctctatgatgggttttaaaatgaattatcaagttaatggttaccctaacatgtttatcacccgcgaagaagctataagacatgtacgtgcatggattggcttcgatgtcgaggggtgtcatgctactagagaagctgttggtaccaatttacctttacagctaggtttttctacaggtgttaacctagttgctgtacctacaggttatgttgatacacctaataatacagatttttccagagttagtgctaaaccaccgcctggagatcaatttaaacacctcataccacttatgtacaaaggacttccttggaatgtagtgcgtataaagattgtacaaatgttaagtgacacacttaaaaatctctctgacagagtcgtatttgtcttatgggcacatggctttgagttgacatctatgaagtattttgtgaaaataggacctgagcgcacctgttgtctatgtgatagacgtgccacatgcttttccactgcttcagacacttatgcctgttggcatcattctattggatttgattacgtctataatccgtttatgattgatgttcaacaatggggttttacaggtaacctacaaagcaaccatgatctgtattgtcaagtccatggtaatgcacatgtagctagttgtgatgcaatcatgactaggtgtctagctgtccacgagtgctttgttaagcgtgttgactggactattgaatatcctataattggtgatgaactgaagattaatgcggcttgtagaaaggttcaacacatggttgttaaagctgcattattagcagacaaattcccagttcttcacgacattggtaaccctaaagctattaagtgtgtacctcaagctgatgtagaatggaagttctatgatgcacagccttgtagtgacaaagcttataaaatagaagaattattctattcttatgccacacattctgacaaattcacagatggtgtatgcctattttggaattgcaatgtcgatagatatcctgctaattccattgtttgtagatttgacactagagtgctatctaaccttaacttgcctggttgtgatggtggcagtttgtatgtaaataaacatgcattccacacaccagcttttgataaaagtgcttttgttaatttaaaacaattaccatttttctattactctgacagtccatgtgagtctcatggaaaacaagtagtgtcagatatagattatgtaccactaaagtctgctacgtgtataacacgttgcaatttaggtggtgctgtctgtagacatcatgctaatgagtacagattgtatctcgatgcttataacatgatgatctcagctggctttagcttgtgggtttacaaacaatttgatacttataacctctggaacacttttacaagacttcagagtttagaaaatgtggcttttaatgttgtaaataagggacactttgatggacaacagggtgaagtaccagtttctatcattaataacactgtttacacaaaagttgatggtgttgatgtagaattgtttgaaaataaaacaacattacctgttaatgtagcatttgagctttgggctaagcgcaacattaaaccagtaccagaggtgaaaatactcaataatttgggtgtggacattgctgctaatactgtgatctgggactacaaaagagatgctccagcacatatatctactattggtgtttgttctatgactgacatagccaagaaaccaactgaaacgatttgtgcaccactcactgtcttttttgatggtagagttgatggtcaagtagacttatttagaaatgcccgtaatggtgttcttattacagaaggtagtgttaaaggtttacaaccatctgtaggtcccaaacaagctagtcttaatggagtcacattaattggagaagccgtaaaaacacagttcaattattataagaaagttgatggtgttgtccaacaattacctgaaacttactttactcagagtagaaatttacaagaatttaaacccaggagtcaaatggaaattgatttcttagaattagctatggatgaattcattgaacggtataaattagaaggctatgccttcgaacatatcgtttatggagattttagtcatagtcagttaggtggtttacatctactgattggactagctaaacgttttaaggaatcaccttttgaattagaagattttattcctatggacagtacagttaaaaactatttcataacagatgcgcaaacaggttcatctaagtgtgtgtgttctgttattgatttattacttgatgattttgttgaaataataaaatcccaagatttatctgtagtttctaaggttgtcaaagtgactattgactatacagaaatttcatttatgctttggtgtaaagatggccatgtagaaacattttacccaaaattacaatctagtcaagcgtggcaaccgggtgttgctatgcctaatctttacaaaatgcaaagaatgctattagaaaagtgtgaccttcaaaattatggtgatagtgcaacattacctaaaggcataatgatgaatgtcgcaaaatatactcaactgtgtcaatatttaaacacattaacattagctgtaccctataatatgagagttatacattttggtgctggttctgataaaggagttgcaccaggtacagctgttttaagacagtggttgcctacgggtacgctgcttgtcgattcagatcttaatgactttgtctctgatgcagattcaactttgattggtgattgtgcaactgtacatacagctaataaatgggatctcattattagtgatatgtacgaccctaagactaaaaatgttacaaaagaaaatgactctaaagagggttttttcacttacatttgtgggtttatacaacaaaagctagctcttggaggttccgtggctataaagataacagaacattcttggaatgctgatctttataagctcatgggacacttcgcatggtggacagcctttgttactaatgtgaatgcgtcatcatctgaagcatttttaattggatgtaattatcttggcaaaccacgcgaacaaatagatggttatgtcatgcatgcaaattacatattttggaggaatacaaatccaattcagttgtcttcctattctttatttgacatgagtaaatttccccttaaattaaggggtactgctgttatgtctttaaaagaaggtcaaatcaatgatatgattttatctcttcttagtaaaggtagacttataattagagaaaacaacagagttgttatttctagtgatgttcttgttaacaactaaacgaacaatgtttgtttttcttgttttattgccactagtctctagtcagtgtgttaatcttacaaccagaactcaattaccccctgcatacactaattctttcacacgtggtgtttattaccctgacaaagttttcagatcctcagttttacattcaactcaggacttgttcttacctttcttttccaatgttacttggttccatgctatacatgtctctgggaccaatggtactaagaggtttgataaccctgtcctaccatttaatgatggtgtttattttgcttccactgagaagtctaacataataagaggctggatttttggtactactttagattcgaagacccagtccctacttattgttaataacgctactaatgttgttattaaagtctgtgaatttcaattttgtaatgatccatttttgggtgtttattaccacaaaaacaacaaaagttggatggaaagtgagttcagagtttattctagtgcgaataattgcacttttgaatatgtctctcagccttttcttatggaccttgaaggaaaacagggtaatttcaaaaatcttagggaatttgtgtttaagaatattgatggttattttaaaatatattctaagcacacgcctattaatttagtgcgtgatctccctcagggtttttcggctttagaaccattggtagatttgccaataggtattaacatcactaggtttcaaactttacttgctttacatagaagttatttgactcctggtgattcttcttcaggttggacagctggtgctgcagcttattatgtgggttatcttcaacctaggacttttctattaaaatataatgaaaatggaaccattacagatgctgtagactgtgcacttgaccctctctcagaaacaaagtgtacgttgaaatccttcactgtagaaaaaggaatctatcaaacttctaactttagagtccaaccaacagaatctattgttagatttcctaatattacaaacttgtgcccttttggtgaagtttttaacgccaccagatttgcatctgtttatgcttggaacaggaagagaatcagcaactgtgttgctgattattctgtcctatataattccgcatcattttccacttttaagtgttatggagtgtctcctactaaattaaatgatctctgctttactaatgtctatgcagattcatttgtaattagaggtgatgaagtcagacaaatcgctccagggcaaactggaaagattgctgattataattataaattaccagatgattttacaggctgcgttatagcttggaattctaacaatcttgattctaaggttggtggtaattataattacctgtatagattgtttaggaagtctaatctcaaaccttttgagagagatatttcaactgaaatctatcaggccggtagcacaccttgtaatggtgttgaaggttttaattgttactttcctttacaatcatatggtttccaacccactaatggtgttggttaccaaccatacagagtagtagtactttcttttgaacttctacatgcaccagcaactgtttgtggacctaaaaagtctactaatttggttaaaaacaaatgtgtcaatttcaacttcaatggtttaacaggcacaggtgttcttactgagtctaacaaaaagtttctgcctttccaacaatttggcagagacattgctgacactactgatgctgtccgtgatccacagacacttgagattcttgacattacaccatgttcttttggtggtgtcagtgttataacaccaggaacaaatacttctaaccaggttgctgttctttatcaggatgttaactgcacagaagtccctgttgctattcatgcagatcaacttactcctacttggcgtgtttattctacaggttctaatgtttttcaaacacgtgcaggctgtttaataggggctgaacatgtcaacaactcatatgagtgtgacatacccattggtgcaggtatatgcgctagttatcagactcagactaattctcctcggcgggcacgtagtgtagctagtcaatccatcattgcctacactatgtcacttggtgcagaaaattcagttgcttactctaataactctattgccatacccacaaattttactattagtgttaccacagaaattctaccagtgtctatgaccaagacatcagtagattgtacaatgtacatttgtggtgattcaactgaatgcagcaatcttttgttgcaatatggcagtttttgtacacaattaaaccgtgctttaactggaatagctgttgaacaagacaaaaacacccaagaagtttttgcacaagtcaaacaaatttacaaaacaccaccaattaaagattttggtggttttaatttttcacaaatattaccagatccatcaaaaccaagcaagaggtcatttattgaagatctacttttcaacaaagtgacacttgcagatgctggcttcatcaaacaatatggtgattgccttggtgatattgctgctagagacctcatttgtgcacaaaagtttaacggccttactgttttgccacctttgctcacagatgaaatgattgctcaatacacttctgcactgttagcgggtacaatcacttctggttggacctttggtgcaggtgctgcattacaaataccatttgctatgcaaatggcttataggtttaatggtattggagttacacagaatgttctctatgagaaccaaaaattgattgccaaccaatttaatagtgctattggcaaaattcaagactcactttcttccacagcaagtgcacttggaaaacttcaagatgtggtcaaccaaaatgcacaagctttaaacacgcttgttaaacaacttagctccaattttggtgcaatttcaagtgttttaaatgatatcctttcacgtcttgacaaagttgaggctgaagtgcaaattgataggttgatcacaggcagacttcaaagtttgcagacatatgtgactcaacaattaattagagctgcagaaatcagagcttctgctaatcttgctgctactaaaatgtcagagtgtgtacttggacaatcaaaaagagttgatttttgtggaaagggctatcatcttatgtccttccctcagtcagcacctcatggtgtagtcttcttgcatgtgacttatgtccctgcacaagaaaagaacttcacaactgctcctgccatttgtcatgatggaaaagcacactttcctcgtgaaggtgtctttgtttcaaatggcacacactggtttgtaacacaaaggaatttttatgaaccacaaatcattactacagacaacacatttgtgtctggtaactgtgatgttgtaataggaattgtcaacaacacagtttatgatcctttgcaacctgaattagactcattcaaggaggagttagataaatattttaagaatcatacatcaccagatgttgatttaggtgacatctctggcattaatgcttcagttgtaaacattcaaaaagaaattgaccgcctcaatgaggttgccaagaatttaaatgaatctctcatcgatctccaagaacttggaaagtatgagcagtatataaaatggccatggtacatttggctaggttttatagctggcttgattgccatagtaatggtgacaattatgctttgctgtatgaccagttgctgtagttgtctcaagggctgttgttcttgtggatcctgctgcaaatttgatgaagacgactctgagccagtgctcaaaggagtcaaattacattacacataaacgaacttatggatttgtttatgagaatcttcacaattggaactgtaactttgaagcaaggtgaaatcaaggatgctactccttcagattttgttcgcgctactgcaacgataccgatacaagcctcactccctttcggatggcttattgttggcgttgcacttcttgctgtttttcagagcgcttccaaaatcataaccctcaaaaagagatggcaactagcactctccaagggtgttcactttgtttgcaacttgctgttgttgtttgtaacagtttactcacaccttttgctcgttgctgctggccttgaagccccttttctctatctttatgctttagtctacttcttgcagagtataaactttgtaagaataataatgaggctttggctttgctggaaatgccgttccaaaaacccattactttatgatgccaactattttctttgctggcatactaattgttacgactattgtataccttacaatagtgtaacttcttcaattgtcattacttcaggtgatggcacaacaagtcctatttctgaacatgactaccagattggtggttatactgaaaaatgggaatctggagtaaaagactgtgttgtattacacagttacttcacttcagactattaccagctgtactcaactcaattgagtacagacactggtgttgaacatgttaccttcttcatctacaataaaattgttgatgagcctgaagaacatgtccaaattcacacaatcgacggttcatccggagttgttaatccagtaatggaaccaatttatgatgaaccgacgacgactactagcgtgcctttgtaagcacaagctgatgagtacgaacttatgtactcattcgtttcggaagagacaggtacgttaatagttaatagcgtacttctttttcttgctttcgtggtattcttgctagttacactagccatccttactgcgcttcgattgtgtgcgtactgctgcaatattgttaacgtgagtcttgtaaaaccttctttttacgtttactctcgtgttaaaaatctgaattcttctagagttcctgatcttctggtctaaacgaactaaatattatattagtttttctgtttggaactttaattttagccatggcagattccaacggtactattaccgttgaagagcttaaaaagctccttgaacaatggaacctagtaataggtttcctattccttacatggatttgtcttctacaatttgcctatgccaacaggaataggtttttgtatataattaagttaattttcctctggctgttatggccagtaactttagcttgttttgtgcttgctgctgtttacagaataaattggatcaccggtggaattgctatcgcaatggcttgtcttgtaggcttgatgtggctcagctacttcattgcttctttcagactgtttgcgcgtacgcgttccatgtggtcattcaatccagaaactaacattcttctcaacgtgccactccatggcactattctgaccagaccgcttctagaaagtgaactcgtaatcggagctgtgatccttcgtggacatcttcgtattgctggacaccatctaggacgctgtgacatcaaggacctgcctaaagaaatcactgttgctacatcacgaacgctttcttattacaaattgggagcttcgcagcgtgtagcaggtgactcaggttttgctgcatacagtcgctacaggattggcaactataaattaaacacagaccattccagtagcagtgacaatattgctttgcttgtacagtaagtgacaacagatgtttcatctcgttgactttcaggttactatagcagagatattactaattattatgaggacttttaaagtttccatttggaatcttgattacatcataaacctcataattaaaaatttatctaagtcactaactgagaataaatattctcaattagatgaagagcaaccaatggagattgattaaacgaacatgaaaattattcttttcttggcactgataacactcgctacttgtgagctttatcactaccaagagtgtgttagaggtacaacagtacttttaaaagaaccttgctcttctggaacatacgagggcaattcaccatttcatcctctagctgataacaaatttgcactgacttgctttagcactcaatttgcttttgcttgtcctgacggcgtaaaacacgtctatcagttacgtgccagatcagtttcacctaaactgttcatcagacaagaggaagttcaagaactttactctccaatttttcttattgttgcggcaatagtgtttataacactttgcttcacactcaaaagaaagacagaatgattgaactttcattaattgacttctatttgtgctttttagcctttctgctattccttgttttaattatgcttattatcttttggttctcacttgaactgcaagatcataatgaaacttgtcacgcctaaacgaacatgaaatttcttgttttcttaggaatcatcacaactgtagctgcatttcaccaagaatgtagtttacagtcatgtactcaacatcaaccatatgtagttgatgacccgtgtcctattcacttctattctaaatggtatattagagtaggagctagaaaatcagcacctttaattgaattgtgcgtggatgaggctggttctaaatcacccattcagtacatcgatatcggtaattatacagtttcctgtttaccttttacaattaattgccaggaacctaaattgggtagtcttgtagtgcgttgttcgttctatgaagactttttagagtatcatgacgttcgtgttgttttagatttcatctaaacgaacaaactaaaatgtctgataatggaccccaaaatcagcgaaatgcaccccgcattacgtttggtggaccctcagattcaactggcagtaaccagaatggagaacgcagtggggcgcgatcaaaacaacgtcggccccaaggtttacccaataatactgcgtcttggttcaccgctctcactcaacatggcaaggaagaccttaaattccctcgaggacaaggcgttccaattaacaccaatagcagtccagatgaccaaattggctactaccgaagagctaccagacgaattcgtggtggtgacggtaaaatgaaagatctcagtccaagatggtatttctactacctaggaactgggccagaagctggacttccctatggtgctaacaaagacggcatcatatgggttgcaactgagggagccttgaatacaccaaaagatcacattggcacccgcaatcctgctaacaatgctgcaatcgtgctacaacttcctcaaggaacaacattgccaaaaggcttctacgcagaagggagcagaggcggcagtcaagcctcttctcgttcctcatcacgtagtcgcaacagttcaagaaattcaactccaggcagcagtaggggaacttctcctgctagaatggctggcaatggcggtgatgctgctcttgctttgctgctgcttgacagattgaaccagcttgagagcaaaatgtctggtaaaggccaacaacaacaaggccaaactgtcactaagaaatctgctgctgaggcttctaagaagcctcggcaaaaacgtactgccactaaagcatacaatgtaacacaagctttcggcagacgtggtccagaacaaacccaaggaaattttggggaccaggaactaatcagacaaggaactgattacaaacattggccgcaaattgcacaatttgcccccagcgcttcagcgttcttcggaatgtcgcgcattggcatggaagtcacaccttcgggaacgtggttgacctacacaggtgccatcaaattggatgacaaagatccaaatttcaaagatcaagtcattttgctgaataagcatattgacgcatacaaaacattcccaccaacagagcctaaaaaggacaaaaagaagaaggctgatgaaactcaagccttaccgcagagacagaagaaacagcaaactgtgactcttcttcctgctgcagatttggatgatttctccaaacaattgcaacaatccatgagcagtgctgactcaactcaggcctaaactcatgcagaccacacaaggcagatgggctatataaacgttttcgcttttccgtttacgatatatagtctactcttgtgcagaatgaattctcgtaactacatagcacaagtagatgtagttaactttaatctcacatagcaatctttaatcagtgtgtaacattagggaggacttgaaagagccaccacattttcaccgaggccacgcggagtacgatcgagtgtacagtgaacaatgctagggagagctgcctatatggaagagccctaatgtgtaaaattaattttagtagtgctatccccatgtgattttaatagcttcttaggagaatgacaaaaaaaaaaaaaaaaaaaaaaaaaaaaaaaaa

SEQ ID NO: 7 - RNA, 29903 nt, Severe acute respiratory syndrome coronavirus 2
  source 1..29903: mol_type = unassigned RNA
tttttttttttttttttttttttttttttttttgtcattctcctaagaagctattaaaatcacatggggatagcactactaaaattaattttacacattagggctcttccatataggcagctctccctagcattgttcactgtacactcgatcgtactccgcgtggcctcggtgaaaatgtggtggctctttcaagtcctccctaatgttacacactgattaaagattgctatgtgagattaaagttaactacatctacttgtgctatgtagttacgagaattcattctgcacaagagtagactatatatcgtaaacggaaaagcgaaaacgtttatatagcccatctgccttgtgtggtctgcatgagtttaggcctgagttgagtcagcactgctcatggattgttgcaattgtttggagaaatcatccaaatctgcagcaggaagaagagtcacagtttgctgtttcttctgtctctgcggtaaggcttgagtttcatcagccttcttctttttgtcctttttaggctctgttggtgggaatgttttgtatgcgtcaatatgcttattcagcaaaatgacttgatctttgaaatttggatctttgtcatccaatttgatggcacctgtgtaggtcaaccacgttcccgaaggtgtgacttccatgccaatgcgcgacattccgaagaacgctgaagcgctgggggcaaattgtgcaatttgcggccaatgtttgtaatcagttccttgtctgattagttcctggtccccaaaatttccttgggtttgttctggaccacgtctgccgaaagcttgtgttacattgtatgctttagtggcagtacgtttttgccgaggcttcttagaagcctcagcagcagatttcttagtgacagtttggccttgttgttgttggcctttaccagacattttgctctcaagctggttcaatctgtcaagcagcagcaaagcaagagcagcatcaccgccattgccagccattctagcaggagaagttcccctactgctgcctggagttgaatttcttgaactgttgcgactacgtgatgaggaacgagaagaggcttgactgccgcctctgctcccttctgcgtagaagccttttggcaatgttgttccttgaggaagttgtagcacgattgcagcattgttagcaggattgcgggtgccaatgtgatcttttggtgtattcaaggctccctcagttgcaacccatatgatgccgtctttgttagcaccatagggaagtccagcttctggcccagttcctaggtagtagaaataccatcttggactgagatctttcattttaccgtcaccaccacgaattcgtctggtagctcttcggtagtagccaatttggtcatctggactgctattggtgttaattggaacgccttgtcctcgagggaatttaaggtcttccttgccatgttgagtgagagcggtgaaccaagacgcagtattattgggtaaaccttggggccgacgttgttttgatcgcgccccactgcgttctccattctggttactgccagttgaatctgagggtccaccaaacgtaatgcggggtgcatttcgctgattttggggtccattatcagacattttagtttgttcgtttagatgaaatctaaaacaacacgaacgtcatgatactctaaaaagtcttcatagaacgaacaacgcactacaagactacccaatttaggttcctggcaattaattgtaaaaggtaaacaggaaactgtataattaccgatatcgatgtactgaatgggtgatttagaaccagcctcatccacgcacaattcaattaaaggtgctgattttctagctcctactctaatataccatttagaatagaagtgaataggacacgggtcatcaactacatatggttgatgttgagtacatgactgtaaactacattcttggtgaaatgcagctacagttgtgatgattcctaagaaaacaagaaatttcatgttcgtttaggcgtgacaagtttcattatgatcttgcagttcaagtgagaaccaaaagataataagcataattaaaacaaggaatagcagaaaggctaaaaagcacaaatagaagtcaattaatgaaagttcaatcattctgtctttcttttgagtgtgaagcaaagtgttataaacactattgccgcaacaataagaaaaattggagagtaaagttcttgaacttcctcttgtctgatgaacagtttaggtgaaactgatctggcacgtaactgatagacgtgttttacgccgtcaggacaagcaaaagcaaattgagtgctaaagcaagtcagtgcaaatttgttatcagctagaggatgaaatggtgaattgccctcgtatgttccagaagagcaaggttcttttaaaagtactgttgtacctctaacacactcttggtagtgataaagctcacaagtagcgagtgttatcagtgccaagaaaagaataattttcatgttcgtttaatcaatctccattggttgctcttcatctaattgagaatatttattctcagttagtgacttagataaatttttaattatgaggtttatgatgtaatcaagattccaaatggaaactttaaaagtcctcataataattagtaatatctctgctatagtaacctgaaagtcaacgagatgaaacatctgttgtcacttactgtacaagcaaagcaatattgtcactgctactggaatggtctgtgtttaatttatagttgccaatcctgtagcgactgtatgcagcaaaacctgagtcacctgctacacgctgcgaagctcccaatttgtaataagaaagcgttcgtgatgtagcaacagtgatttctttaggcaggtccttgatgtcacagcgtcctagatggtgtccagcaatacgaagatgtccacgaaggatcacagctccgattacgagttcactttctagaagcggtctggtcagaatagtgccatggagtggcacgttgagaagaatgttagtttctggattgaatgaccacatggaacgcgtacgcgcaaacagtctgaaagaagcaatgaagtagctgagccacatcaagcctacaagacaagccattgcgatagcaattccaccggtgatccaatttattctgtaaacagcagcaagcacaaaacaagctaaagttactggccataacagccagaggaaaattaacttaattatatacaaaaacctattcctgttggcataggcaaattgtagaagacaaatccatgtaaggaataggaaacctattactaggttccattgttcaaggagctttttaagctcttcaacggtaatagtaccgttggaatctgccatggctaaaattaaagttccaaacagaaaaactaatataatatttagttcgtttagaccagaagatcaggaactctagaagaattcagatttttaacacgagagtaaacgtaaaaagaaggttttacaagactcacgttaacaatattgcagcagtacgcacacaatcgaagcgcagtaaggatggctagtgtaactagcaagaataccacgaaagcaagaaaaagaagtacgctattaactattaacgtacctgtctcttccgaaacgaatgagtacataagttcgtactcatcagcttgtgcttacaaaggcacgctagtagtcgtcgtcggttcatcataaattggttccattactggattaacaactccggatgaaccgtcgattgtgtgaatttggacatgttcttcaggctcatcaacaattttattgtagatgaagaaggtaacatgttcaacaccagtgtctgtactcaattgagttgagtacagctggtaatagtctgaagtgaagtaactgtgtaatacaacacagtcttttactccagattcccatttttcagtataaccaccaatctggtagtcatgttcagaaataggacttgttgtgccatcacctgaagtaatgacaattgaagaagttacactattgtaaggtatacaatagtcgtaacaattagtatgccagcaaagaaaatagttggcatcataaagtaatgggtttttggaacggcatttccagcaaagccaaagcctcattattattcttacaaagtttatactctgcaagaagtagactaaagcataaagatagagaaaaggggcttcaaggccagcagcaacgagcaaaaggtgtgagtaaactgttacaaacaacaacagcaagttgcaaacaaagtgaacacccttggagagtgctagttgccatctctttttgagggttatgattttggaagcgctctgaaaaacagcaagaagtgcaacgccaacaataagccatccgaaagggagtgaggcttgtatcggtatcgttgcagtagcgcgaacaaaatctgaaggagtagcatccttgatttcaccttgcttcaaagttacagttccaattgtgaagattctcataaacaaatccataagttcgtttatgtgtaatgtaatttgactcctttgagcactggctcagagtcgtcttcatcaaatttgcagcaggatccacaagaacaacagcccttgagacaactacagcaactggtcatacagcaaagcataattgtcaccattactatggcaatcaagccagctataaaacctagccaaatgtaccatggccattttatatactgctcatactttccaagttcttggagatcgatgagagattcatttaaattcttggcaacctcattgaggcggtcaatttctttttgaatgtttacaactgaagcattaatgccagagatgtcacctaaatcaacatctggtgatgtatgattcttaaaatatttatctaactcctccttgaatgagtctaattcaggttgcaaaggatcataaactgtgttgttgacaattcctattacaacatcacagttaccagacacaaatgtgttgtctgtagtaatgatttgtggttcataaaaattcctttgtgttacaaaccagtgtgtgccatttgaaacaaagacaccttcacgaggaaagtgtgcttttccatcatgacaaatggcaggagcagttgtgaagttcttttcttgtgcagggacataagtcacatgcaagaagactacaccatgaggtgctgactgagggaaggacataagatgatagccctttccacaaaaatcaactctttttgattgtccaagtacacactctgacattttagtagcagcaagattagcagaagctctgatttctgcagctctaattaattgttgagtcacatatgtctgcaaactttgaagtctgcctgtgatcaacctatcaatttgcacttcagcctcaactttgtcaagacgtgaaaggatatcatttaaaacacttgaaattgcaccaaaattggagctaagttgtttaacaagcgtgtttaaagcttgtgcattttggttgaccacatcttgaagttttccaagtgcacttgctgtggaagaaagtgagtcttgaattttgccaatagcactattaaattggttggcaatcaatttttggttctcatagagaacattctgtgtaactccaataccattaaacctataagccatttgcatagcaaatggtatttgtaatgcagcacctgcaccaaaggtccaaccagaagtgattgtacccgctaacagtgcagaagtgtattgagcaatcatttcatctgtgagcaaaggtggcaaaacagtaaggccgttaaacttttgtgcacaaatgaggtctctagcagcaatatcaccaaggcaatcaccatattgtttgatgaagccagcatctgcaagtgtcactttgttgaaaagtagatcttcaataaatgacctcttgcttggttttgatggatctggtaatatttgtgaaaaattaaaaccaccaaaatctttaattggtggtgttttgtaaatttgtttgacttgtgcaaaaacttcttgggtgtttttgtcttgttcaacagctattccagttaaagcacggtttaattgtgtacaaaaactgccatattgcaacaaaagattgctgcattcagttgaatcaccacaaatgtacattgtacaatctactgatgtcttggtcatagacactggtagaatttctgtggtaacactaatagtaaaatttgtgggtatggcaatagagttattagagtaagcaactgaattttctgcaccaagtgacatagtgtaggcaatgatggattgactagctacactacgtgcccgccgaggagaattagtctgagtctgataactagcgcatatacctgcaccaatgggtatgtcacactcatatgagttgttgacatgttcagcccctattaaacagcctgcacgtgtttgaaaaacattagaacctgtagaataaacacgccaagtaggagtaagttgatctgcatgaatagcaacagggacttctgtgcagttaacatcctgataaagaacagcaacctggttagaagtatttgttcctggtgttataacactgacaccaccaaaagaacatggtgtaatgtcaagaatctcaagtgtctgtggatcacggacagcatcagtagtgtcagcaatgtctctgccaaattgttggaaaggcagaaactttttgttagactcagtaagaacacctgtgcctgttaaaccattgaagttgaaattgacacatttgtttttaaccaaattagtagactttttaggtccacaaacagttgctggtgcatgtagaagttcaaaagaaagtactactactctgtatggttggtaaccaacaccattagtgggttggaaaccatatgattgtaaaggaaagtaacaattaaaaccttcaacaccattacaaggtgtgctaccggcctgatagatttcagttgaaatatctctctcaaaaggtttgagattagacttcctaaacaatctatacaggtaattataattaccaccaaccttagaatcaagattgttagaattccaagctataacgcagcctgtaaaatcatctggtaatttataattataatcagcaatctttccagtttgccctggagcgatttgtctgacttcatcacctctaattacaaatgaatctgcatagacattagtaaagcagagatcatttaatttagtaggagacactccataacacttaaaagtggaaaatgatgcggaattatataggacagaataatcagcaacacagttgctgattctcttcctgttccaagcataaacagatgcaaatctggtggcgttaaaaacttcaccaaaagggcacaagtttgtaatattaggaaatctaacaatagattctgttggttggactctaaagttagaagtttgatagattcctttttctacagtgaaggatttcaacgtacactttgtttctgagagagggtcaagtgcacagtctacagcatctgtaatggttccattttcattatattttaatagaaaagtcctaggttgaagataacccacataataagctgcagcaccagctgtccaacctgaagaagaatcaccaggagtcaaataacttctatgtaaagcaagtaaagtttgaaacctagtgatgttaatacctattggcaaatctaccaatggttctaaagccgaaaaaccctgagggagatcacgcactaaattaataggcgtgtgcttagaatatattttaaaataaccatcaatattcttaaacacaaattccctaagatttttgaaattaccctgttttccttcaaggtccataagaaaaggctgagagacatattcaaaagtgcaattattcgcactagaataaactctgaactcactttccatccaacttttgttgtttttgtggtaataaacacccaaaaatggatcattacaaaattgaaattcacagactttaataacaacattagtagcgttattaacaataagtagggactgggtcttcgaatctaaagtagtaccaaaaatccagcctcttattatgttagacttctcagtggaagcaaaataaacaccatcattaaatggtaggacagggttatcaaacctcttagtaccattggtcccagagacatgtatagcatggaaccaagtaacattggaaaagaaaggtaagaacaagtcctgagttgaatgtaaaactgaggatctgaaaactttgtcagggtaataaacaccacgtgtgaaagaattagtgtatgcagggggtaattgagttctggttgtaagattaacacactgactagagactagtggcaataaaacaagaaaaacaaacattgttcgtttagttgttaacaagaacatcactagaaataacaactctgttgttttctctaattataagtctacctttactaagaagagataaaatcatatcattgatttgaccttcttttaaagacataacagcagtaccccttaatttaaggggaaatttactcatgtcaaataaagaataggaagacaactgaattggatttgtattcctccaaaatatgtaatttgcatgcatgacataaccatctatttgttcgcgtggtttgccaagataattacatccaattaaaaatgcttcagatgatgacgcattcacattagtaacaaaggctgtccaccatgcgaagtgtcccatgagcttataaagatcagcattccaagaatgttctgttatctttatagccacggaacctccaagagctagcttttgttgtataaacccacaaatgtaagtgaaaaaaccctctttagagtcattttcttttgtaacatttttagtcttagggtcgtacatatcactaataatgagatcccatttattagctgtatgtacagttgcacaatcaccaatcaaagttgaatctgcatcagagacaaagtcattaagatctgaatcgacaagcagcgtacccgtaggcaaccactgtcttaaaacagctgtacctggtgcaactcctttatcagaaccagcaccaaaatgtataactctcatattatagggtacagctaatgttaatgtgtttaaatattgacacagttgagtatattttgcgacattcatcattatgcctttaggtaatgttgcactatcaccataattttgaaggtcacacttttctaatagcattctttgcattttgtaaagattaggcatagcaacacccggttgccacgcttgactagattgtaattttgggtaaaatgtttctacatggccatctttacaccaaagcataaatgaaatttctgtatagtcaatagtcactttgacaaccttagaaactacagataaatcttgggattttattatttcaacaaaatcatcaagtaataaatcaataacagaacacacacacttagatgaacctgtttgcgcatctgttatgaaatagtttttaactgtactgtccataggaataaaatcttctaattcaaaaggtgattccttaaaacgtttagctagtccaatcagtagatgtaaaccacctaactgactatgactaaaatctccataaacgatatgttcgaaggcatagccttctaatttataccgttcaatgaattcatccatagctaattctaagaaatcaatttccatttgactcctgggtttaaattcttgtaaatttctactctgagtaaagtaagtttcaggtaattgttggacaacaccatcaactttcttataataattgaactgtgtttttacggcttctccaattaatgtgactccattaagactagcttgtttgggacctacagatggttgtaaacctttaacactaccttctgtaataagaacaccattacgggcatttctaaataagtctacttgaccatcaactctaccatcaaaaaagacagtgagtggtgcacaaatcgtttcagttggtttcttggctatgtcagtcatagaacaaacaccaatagtagatatatgtgctggagcatctcttttgtagtcccagatcacagtattagcagcaatgtccacacccaaattattgagtattttcacctctggtactggtttaatgttgcgcttagcccaaagctcaaatgctacattaacaggtaatgttgttttattttcaaacaattctacatcaacaccatcaacttttgtgtaaacagtgttattaatgatagaaactggtacttcaccctgttgtccatcaaagtgtcccttatttacaacattaaaagccacattttctaaactctgaagtcttgtaaaagtgttccagaggttataagtatcaaattgtttgtaaacccacaagctaaagccagctgagatcatcatgttataagcatcgagatacaatctgtactcattagcatgatgtctacagacagcaccacctaaattgcaacgtgttatacacgtagcagactttagtggtacataatctatatctgacactacttgttttccatgagactcacatggactgtcagagtaatagaaaaatggtaattgttttaaattaacaaaagcacttttatcaaaagctggtgtgtggaatgcatgtttatttacatacaaactgccaccatcacaaccaggcaagttaaggttagatagcactctagtgtcaaatctacaaacaatggaattagcaggatatctatcgacattgcaattccaaaataggcatacaccatctgtgaatttgtcagaatgtgtggcataagaatagaataattcttctattttataagctttgtcactacaaggctgtgcatcatagaacttccattctacatcagcttgaggtacacacttaatagctttagggttaccaatgtcgtgaagaactgggaatttgtctgctaataatgcagctttaacaaccatgtgttgaacctttctacaagccgcattaatcttcagttcatcaccaattataggatattcaatagtccagtcaacacgcttaacaaagcactcgtggacagctagacacctagtcatgattgcatcacaactagctacatgtgcattaccatggacttgacaatacagatcatggttgctttgtaggttacctgtaaaaccccattgttgaacatcaatcataaacggattatagacgtaatcaaatccaatagaatgatgccaacaggcataagtgtctgaagcagtggaaaagcatgtggcacgtctatcacatagacaacaggtgcgctcaggtcctattttcacaaaatacttcatagatgtcaactcaaagccatgtgcccataagacaaatacgactctgtcagagagatttttaagtgtgtcacttaacatttgtacaatctttatacgcactacattccaaggaagtcctttgtacataagtggtatgaggtgtttaaattgatctccaggcggtggtttagcactaactctggaaaaatctgtattattaggtgtatcaacataacctgtaggtacagcaactaggttaacacctgtagaaaaacctagctgtaaaggtaaattggtaccaacagcttctctagtagcatgacacccctcgacatcgaagccaatccatgcacgtacatgtcttatagcttcttcgcgggtgataaacatgttagggtaaccattaacttgataattcattttaaaacccatcatagagatgagtcttctataggtcatgtccttaggtatgccaggtatgtcaacacataaaccttcagttttgaatttagtgtcaacactgaggtgtgtaggtgcctgtgtaggatgtaacccagtgattaccttactacaatctttaaagagtcctgttacattttcagcttgtaaagttgccacattcctacgtggaatttcaagacttgtaaattgcaacttgtcataaaggtctctatcagacattatgcaaagtatgcctacttttgctctggtaatagcaacattaaatctgtttacattacaagagtgagctgtttcagtggtttgagtgaatatgacatagtcatattctgagccctgtgatgaatcaacagtttgagttggtagtcccaaaatctttgaggctacagcattctgtgaattataaggtgaaataaagacagcttttctccaagcagggttacgtgtaaggaattctcttaccacgcctatttgtggcctgttaattgcagatgaaacatcatgcgtgataacacccttataaaacattttaaagcattgagctgatttgtctttatgtgctttaagcttattatcataaaccaaagcactcacagtgtcaacaatttcagcaggacaacgccgacaagttccgaggaacatgtctggacctatagttttcataagtctacacactgaattgaaatattctggttctagtgtgcccttagttagcaatgtgcgtggtgcaggtaattgagcagggtcgccaatgtacacatagtgcttagcacgtaatctggcattgacaacactcaaatcataatttgtggccattgaaatttcatcaaagacaactatatctgctgtcgtctcaggcaatgcatttacagtacaaaagacatactgttctaatgttgaattcactttgaatttatcaaaacactctacacgagcacgtgcaggtataattctactacatttatctataggcaaatattttaatgccttctcacatagtgcatcaacagcggcatgagagcaagctgtatacactatgcgagcagaagggtagtagagagctaggccaatagcaaaatgactcttaccagtaccaggtggtccctggagtgtagaatacttttgcataccaaccttttgataatttgcaacattgctagaaaactcatctgagatattgagtgttgggtataagccagtaattctaacatagtgctcttgtggcactagtgtaggtgcacttaatggcattactgtatgtgatgtcagcacaaaataatcaccaacatttaatttgtaagttgttgtacctcggtaaacaacagcatcaccatagtcacctttttcaaaggtgtactctcctatttgtactttactgtttttagttacacgataaccagtaaagacataatttcggttaagtggtggtctaggtttaccaacttcccatgaaagatgtaattctctgtcagacagcacttcacgtacagtagcaataccataagacagtttaaatgtctcctcagtagctttgagcgtttctgctgcaaaaagcttgagtctttcagtacaggtgttagctaaaatgtaatcaccagcatttgtccagtcacatgttgcaattgcattaaagtcagtaacattatcgctaccaacacatgtatttttatataaaccaaaaacttgtccattagcacacaatggaaaactaatgggtggtttatgtgatttacaataatagctcatacctcctaagtaaagttgagtcacatctgtgacatcacaacctggagcattgcaaacatacggattaacagacaagactaatttatgtgatgttgatatgacatggtcgtaacagcatttacaacataagaatggtctacgtatgcaagcaccacatcttaatgaagtctgtgaattgcaaagaacacaagccccaacagcctgtaagactgtatgcggtgtgtacatagcctcataaaactcaggttcccaataccttgaagtgttatcattagtaagcataacagaatacatgtctaacatgtgtcctgttaactcatcatgtagctttcttatgtattgtaagtacaaatgaaagacatcagcatactcctgattaggatgtttagtaagtgggtaagcatctatagctaaagacacgaaccgttcaatcataagtgtaccatctgtttttacgatatcatctacaaaacagccggcccctaggattcttgatggatctgggtaaggaaggtacacataatcatcaccctgtttaactagcattgtatgttgagagcaaaattcatgaggtcctttagtaaggtcagtctcagtccaacattttgcttcagacataaaaacattgttttgataataaagaactgacttaaagttctttatgctagccactagaccttgagatgcataagtgctattgaaacacacaacagcatcgtcagagagtatcatcattgagaaatgtttacgcaaatatgcgtaaaactcattcacaaagtctgtgtcaacatctctatttctatagagacactcataaagtctgtgttgtaaattgcggacatacttatcggcaattttgttaccatcagtagataaaagtgcattaacattggccgtgacagcttgacaaatgttaaaaacactattagcataagcagttgtggcatctcctgatgaggttccacctggtttaacatatagtgaaccgccacacatgaccatttcactcaatacttgagcacactcattagctaatctatagaaacggtgtgacaagctacaacacgttgtatgtttgcgagcaagaacaagtgaggccataattctaagcatgttaggcatggctctatcacatttaggataatcccaacccataaggtgagggttttctacatcactataaacagtttttaacatgttgtgccaaccaccatagaatttgcttgttccaattactacagtagctcctctagtggcggctattgatttcaataatttttgatgaaactgtctattggtcatagtactacagatagagacaccagctacggtgcgagctctattctttgcactaatggcatacttaagattcatttgagttatagtagggatgacattacgttttgtatatgcgaaaagtgcatcttgatcctcataactcattgaatcataataaagtctagccttaccccatttattaaatggaaaaccagctgatttgtctaggttgttgacgatgacttggttagcattaatacagccaccatcgtaacaatcaaagtacttatcaacaacttcaactacaaatagtagttgtctgatatcacacattgttggtagattataacgatagtagtcataatcgctgatagcagcattaccatcctgagcaaagaagaagtgttttaattcaacagaacttccttccttaaagaaacccttagacacagcaaagtcatagaagtctttgttaaaattaccgggtttgacagtttgaaaagcaacattgttagtaagtgcagctactgaaaagcacgtagtgcgtttatctagtaatagattaccagaagcagcgtgcatagcagggtcagcagcatacacaagtaattccttaaaactaagtctagagctatgtaagtttacatcctgattatgtacaacacctagctctctgaagtggtatccagttgaaactacaaatggaacaccatcaacaaatatttttctcactagtggtccaaaacttgtaggtgggaacactgtagagaataaaacattaaagtttgcacaatgcagaatgcatctgtcatccaaacagttaacacaatttgggtggtatgtctgatcccaatatttaaaataacggtcaaagagttttaacctctcttccgtgaagtcatattttaacaaatcccacttaatgtaaggctttgttaagtcagtgtcaacatgtgactctgcagttaaagccctggtcaaggttaatataggcattaacaatgaataataagaatctacaacaggaactccactacctggcgtggtttgtatgaaatcaccgaaatcataccagttaccattgagatcttgattatctaatgtcagtacaccaacaataccagcatttcgcatggcatcacagaattgtactgtttttaacaaagcttggcgtacacgttcacctaagttggcgtatacgcgtaatatatctgggttttctacaaaatcataccagtcctttttattgaaataatcatcatcacaacaattgtatgtgacaagtatttcttttaatgtgtcacaattaccttcatcaaaatgccttaaagcatagacgaggtctgccattgtgtatttagtaagacgttgacgtgatatatgtggtaccatgtcaccgtctattctaaacttaaagaagtcatgtttagcaacagctggacaatccttaagtaaattataaattgtttcttcatgttggtagttagagaaagtgtgtctcttaactacaaagtaagaatcaattaaattgtcatcttcgtccttttcttggaagcgacaacaattagtttttaggaatttagcaaaaccagctactttatcattgtagatgtcaaaagccctgtatacgacatcagtactagtgcctgtgccgcacggtgtaagacgggctgcacttacaccgcaaacccgtttaaaaacgattgtgcatcagctgactgaagcatgggttcgcggagttgatcacaactacagccataacctttccacataccgcagacggtacagactgtgtttttaagtgtaaaacccacagggtcattagcacaagttgtaggtatttgtacatacttaccttttaagtcacaaaatcctttaggatttggatgatctatgtggcaacggcagtacagacaacacgatgcaccaccaaaggattcttgatccatattggcttccggtgtaactgttattgcctgaccagtaccagtgtgtgtacacaacatcttaacacaattagtgattggttgtcccccactagctagataatctttgtaagctttagcagcatctacagcaaaagcacagaaagataatacagttgaattggcaggcacttctgttgcattaccagcttgtagacgtactgtggcagctaaactaccaagtaccatacctctatttaggttgtttaatcctttaataaagtataaatacttcactttaggacctttaggtgtgtctgtaacaaacctacaaggtggttccagttctgtatagatagtaccagttccatcactcttagggaatctagcccatttcaaatcctgtaaatcggataacagtgcaagtacaaacctacctccctttgttgtgttgtagtaagctaacgcattgtcatcagtgcaagcagtttgtgtagtaccggcagcacaagacatctgtcgtagtgcaacaggactaagctcattattctgtaatttgacagcagaattggcccttaaagctgttacaataagaggccatgctaaattaggtgaattgtccatactaatttcactaagttgaacaattttactatctgcatctacaacctgttggatttcccacaatgctgatgcataagtaaatgttgtaccatcacacgtatttttatatgtgttatagtctggtatgacaaccattagtttggctgctgttgtaagaggtattatgttcaagggaacacaaccatctcttgcattgttgataatgttgttgagtgcatcattatccaactttctaagcatagtgaaaagcattgtctgcatagcactagtaacttttgccctcttgtcctcagatctagcctgtttatacatttgggtcatagcttgatcagccatcttttccaacttacgttgcatggctgcatcacggtcaaattcagatttagccacattcaaagacttcttcaactttttaagaacaacttcagaatcaccattagcaacagcctgctcataagcttcttgagcagtagcaaaagctgcatatgatggaagggaactaaactctgaggctatagcttgtaaggttgccctgttgtccagcatttcttcacaaagcttgtttatgtctacagcaccctgcatggaaagcaaaacagaaagtagtgaaaccattttttcaaaggcttcagtagtatctttagctaagagaatgtcattgtgtaactggacacattgagcccacaatttagatgatgattctactctgagttgttgcaaaactgagagtaagactactgatgtgcactttacatctgacattttagactgtacagtggctactttgatacaaggtttgccaccaacacccaacaatttaatgttgagtttgaaggcatctatgctattcttgggtgggagtagtccctgtgaattcatatatctaaactcctgtgtagaaactaagtaatcataaacaccaagagtcagtctaaagtagcggttgagtaaacaaaagaggccaaagtaacaagtacaaaaatagcctaagaaacaataaactagcattatacactgaagtgtattaccagttatgaagaaaatagggcaatactcaacacacataaaaacaatacctctggccaaaaacatgacagttgtaactacacctgagtagttagaagtaacagagattataagagcccacatggaaatggcttgatctaaagcattaccataataaactttataaacgagtgtcaagacattcataagtgtccacactctcctagcaccatcatcatacacagttcttgctgtcataaggattagtaacactacagctgatgcatacataacacagtcttttagcttaaaaccagacaaactagtatcaaccatatccaaccatgtcataatacgcatcacccaactagcaggcatatagaccatattaaaataagctacagtggcaagagaaggtaacaaaaacaaacagagaaatgcatgcttatgtttgacaaacatcattgcaaaagcagacatagcaataatacccatagcaaaaggtaaaaaggcattttcatacaaaaaaaagaacaaagaccattgagtactctggactaaaactaaaagtgaagtcaaaattgtgagtaacaaccagtggtgtgtacccttgattgttcttttcactgcactttggaaagtaacacctgagcattgtctaacaacatcaaaaggtgtaaattcatcttctaataaagcactacccaatatggtacgtccattcataccattttgcagtaattcttttaatgaagcacacatatctaaaacggcaattccagtttgagcagaaagaggtcctagtatgtcaacatggtcttgtgttagaggttcataattgtacttcatagccacaaggttaaagtcattaagagttgtggtaaatcgattgagaaaccacctgtctccatttataacagcagcgtacaaccaagctaaaacattaactgtaatagttgtgtccgtaccagctgcttgtgctgtttgcctgtcaacaaaaggtccataaaagttaccttctaagtctgtgccagcatgaactccagttggtaattccatatggtgcatgtaacaaaaagagacacagtcataatctatgttaaaaccaacactaccacatgaaccattaaggaatgaacccttaatagtgaaattgggcctcatagcacattggtaaacaccagatggtgaaccattgtaacaagctaacactgaaaaagtctgtcctggttgaatgcgaacaaacttatacttaggtgtcttaggattggctgtatcaaccttaagcttaagtacacaattttgcatagaatgtccaataaccctgagttgaacattaccagcctgtaccaagaaattatgattagacttacgaatgagtaaatcttcataattagggttaagcatgtcttcagaggtgcagatcacatgtcttggacagtaaactacgtcatcaagccaaagaccgttaagtgtagttgtaccacaagttacttgtaccatacaaccctcaactttaccagatgggaatgccatttttctaaaaccactctgcaaaacagctgaggtgatagaggtttgtggtggttggtaaagaacatcagaacctgagttactgaagtcattgagagcctttgcgagatgacaacaagcagcttctctgtagctagttgtatccattgctccactaaaatacttgtacttattataaagagctaagtatctattatattgcgtaagaggtaatagcacatcactacgcaactttagatacatttctttatttaacaaaaaggtgcacagcgcagcttcttcaaaagtactaaaggaaacaccattaaagactacacgtctctttaggtaattactaaagaaccaatagaaatgctttgtggaaatacaaatgatataagcaattgttatccagaaaggtactaaaggtgtgaacataaccatccactgaatatgtgctaaaaaagaaacatcattagtaagataaaatgtcaagtacaagtaaataacagaataaacaccaggtaagaatgagtaaactggtgttaaacagagtacagtgaatgacataaggaatagtaaagtattaaaggcaactacatgactgtattcaccaaaagctcttctaaacctcataaaatagtaggcaaggcatgttactacgatagctacaataccaccagctactatagatgctgatatgtccaaagcaccaataggttgaattagtggtgtaaacatattagtaagtaaatttacagcatctacaccacagaaaactcctggtaaagatctgtaataatcattgttaagtacccatctaccactagtagatacacaaacaccagcttctgatctttcacaagtgccgtgcctacagtactcagaatcaaaagttgttaccactctaacagaaccttcaaggtaggtgttaggaaattgaataatagagccatccatgagcacataacgtgtgtcagggcgtaaactttcataagcaacagaaccttctagtacattggtatcataacaatatggtactggcttaccagaagcatctttaaaaattgtacattcagcagccaaaacacaagctgatgttgcaaagtcagtgtactctataagttttgatggtgtgtaacagatgttaccaactgcactaaaaactctaggtaagaaatgcaaaaagtcaccattagttgtgcgtaatatcgtgccaggcaaaccaggcacgacaaaacccacttctcttgttatgactgcagcaatcaatgggcaagctttgtcattagtataactaccaccacgctggctaaaccatgtgtcaaaatcagcatgtttgttagcaaaacaagtatctgtagatgctatgtcacgagtgacaccaccatcaatagccttgtatcctatgatttcacttgaaaagtcagtatgtttagacatgacatgaacaggtgttattaaatagaaaatagcagcaacaaaaaggaacacaagtgtaactttaattaactgcttcaaccaattattaacaattttaccacccttaagtgctatctttgttgttacaacattaacaacttgtctagtagttgcacatgtcaacttaaaaggtaagttattctttttagcagcactacgtatttgttttcgtagttgttcagacaatgacatgaaatctttaacgttccatatcaaagcaatgttgtgactttttgctacctgcgcattaatatgacgcgcactacagtcaatacaagcaccaaggtcacggggtgtcatgttttcaactttgttataggtgagcatatagttattacaactatcgccagtaacttctatgtcagattgatgtgacaatttaagacattcaacaacatctttagtttctacatctgaatcaacaaacccttgccgagctgctgaaataaaagtagataagacattgtctaaggacacattctttgcaagttcagcttctgcagttgcaactagtgttttgagtttttccattggtacgttaaaagttgatgaaaacgtattaacgtaagcatcaaacattttaactgcaacttccgcactatcaccaacatcagacactaatgcctgatctagtaacagtataggttgacacataagctgactgtagtaaacagacgctgattttgcagatgattcttcacattttgatttaccatcaaaaactataacattaataggcaatgaacctttagtgttattagctctcaggttgtctaagttaacaaaatgagagagagaatgtctttcataagtcttttgaccagctttatcaaagtaaagatggatggaaccattcttcactgtaacactatcaacgatgtaagaagactggtcagtaggatttattggtcttttaaactgtagtgacaagtctctcgcaacttcatcactaataaatgtactaccagcacagaatgtatcacaattaacacaattccaattgtgtagtttgcaaaagcctttacctccattagcatagacataaaaggaccttctaacaccattaacaatagttgtacattcgactcttgttgctctattacgtttgtaacacatcatacaagttgatgaattacaaccgtctacaacatgcacataacttttccatacataataaaatgatgcaaagaagatgtacattctaaccatagctgaaatcggggccatttgtacaagattaattattaaccacataagccaagaattactaataaaatgtactgcaaaatagctgaaaaacaattgcatgattgcagccaatccaagtacatagaaaaacctagtgaaaagaatatatgccaaaaaccactctgcaactaagccaaaagcagttaaatcccatttaaaagatgaaatggtaatttgtatagtttctaaagaaggataggtgtctaaagaatctaaaccactaagacaaacactacaaggtatagaaccagtacagtaggttgcaatagtgacattagtagagttcaaatagccttctctgtaaccagtacagtaagaaggcatgcctaaattagacattaaaacacctaaagcagcggttgagtagattaaagaacctaggcaaacacttaatagtaaaaaccaaattataatatttatcagtttagaaaaattaggtgacttcaaataattaaatgaagcctctagacaaaatttaccgacactcttaacagtattctttgctatagtagtcggcatagatgctttaattctagaatttgtacttctagtaaaagtacacaattgtagcaataaagtaaagaaataaggcatataattagtacaaacacggtttaaacaccgtgtaactatgttagtagttgtactaacaactttgttaagaaaaggcttagcataattagctatagtatcccaagggacactattaacagcagctaaaccatgagtagcaagggttttcaaacctaatactctagataattcattaggtttcttaatagtaagactagaattgtctacataagcagccattagatctgtgtggccaacctcttctgtaatttttaaactattatttgctggtttaagtataatgtctcctacaacttcggtagttttcacattacactcaagaacgtctttctgtatggtaggattttccactacttcttcagagactggttttagatcttcgcaggcaagattatccattccctgcgcgtcctctgacttcagtacatcaaacgaatttgatgtttcaactggttttgtgctccaaagacaacgtatacaccaggtatttggtttatacgtggctttattagttgcattgttaacatgccaaacaataggtttatgtaacaatttagctcctttcttaaaagagggtgtgtagtgtttataatcaatagccaccacatcaccatttaagtcagggaaaaatgtaactttaagctctcttgaagcaggtttcttataaccagttaactggtttaaatcatcagcaaatttgatattatcacatacaaacttaaaattatcgaagcttgcgtttggatatggttggtttggtacaagatcaattggttgctctgtgaaataagaattgtctttcttataataattgtccaacttagggtcaatttctgtacaaacaacaccatccaatttataagtaactggttttatggttgttgtgtaactgttttctttgtagaaaacatccgtaataggacctttgtattctgaggactttgtaagtaaagcaccgtctatgcaatacaaagtttctttagaagttatatgtttatagtgaccacactggtaattaccagtgtactcactagcacaagtaaatgtaccatgcttaagttcatactgagcaggtggtgctgacatcataacaaaaggtgactcctgttgtactagatattttgtagcttgtttaccacacgtacaaggtatctgaacacctttcttaaattgttcataagaaagtgtgcccatgtacataacagcttctacacccttaagggttgtctgctgttgtccacaagttttacacaccacgttcaagactcttttgcaagaatctaaattggcatgttgaaacaagtaactcattgtttctctaacatcacctaactcacctactgtcttattacagtaggctaagataagtgcacaaaagttagcagcttcaccagcccttgctctgtaataagcatcttgtagagcaggtggattaaacttcaactctatttgttggagtgttaacaatgcagtggcaagataacagttgttatctgcccatttaatagaagttaaaccattaacttgtgggtatttccactttttagtgtgatttaatgctgacatgtacctacccagaaaactaggatcagttgtgtggtagtactcaaaagcctcaacacgtagagtgtcatcattaggtaaaacataaaatgttttaccttcatgtgaattatgaggttttattttagtaacatcagctccatccaaataagttggaccaaactgttgtccatatgtcattgacatgtccacaacttgcgtgtggaggttaatgttgtctactgttgtaaacaccttaatagtcctcacttctctcaaagaaagaagtgtcttaagattgtcaaaggtgataacttcaccatctaggtggaatgtggtaggattactagtgtaatatacacttttatcacctctcttaagaaattctatacctagttgtgtagattgtccagaataggaccaatctttataggaaccagcaagtgagatggtttcaataaaatgttcttcaggtgttttagaagaagaagtaagataaccattatacgctgtaacagcatcaggtgaagaaacagaaactgtagctggcactttgagagatctcatataccgagcagcttcttccaaatttaagccatgtgttacatagccaagtggcattgtaacaagagtttcatttagatcgttaagtgtgttgataagtgacgctacagttgttttactggtgtaaaagtaaaatctagcaccataatcaaccacaccctcttgtattttaatacccttatatttacgctgtatagttgaaactatggctttagtttccacacagacaggcattaatttgcgtgtttcttctgcatgtgcaagcatttctcgcaaattccaagaaacagttccaagaatttcttgcttctcattagagataatagatggtagaatgtaaaaggcacttttacactttttaagcactgtctttgcctcctctacagtgtaaccatttaaaccctgacccgggtaagtggttatataattgtctgttggcacttttctcaaagctttcgctagcatttcagtagtgccaccagcctttttagtaggtataaccacagcagttaaaacaccctcttgaacaacatcacccactatatatggagcatctttctttaagaaagtgatgtcaatgtcactaacaagagtggcagaatctggatgaagattgccattaatgtcaatataaagtaacaagttttctgtgaggaacttagtttcttccagagttgttgtaacttcttcaacacaagctttgattttcttatcatcttgttttctctgttcaactgaaggtttactttcagttataaatggcttaacttcctctttaggaatctcagcgatcttttgttcaacttgcttttcactcttcatttccaaaaagcttgaaacaagtttgtcatagagatttttatcaaagacagctaagtagacatttgtgcgaacagtatctacacaaactcttaaagaatgtatagggtcagcaccaaaaataccagctgataataatggtgcaagtagaacttcgtgctgattaaaattttcataagcactcttaagaagttgaatgtcttcacctttgttaacatttgggccgacaacatgaagacagtgtttagcaagattgtgtccgcttaaaacacaactaccacccactttaagtggtccattagtagctatgtaatcatcagattcaacttgcatggcattgttagtagccttatttaaggctcctgcaacacctcctccatgtttaaggtaaacattggctgcattaacaaccactgttggttttacctttttagcttcttccacaatgtctgcatttttaatgtatacattgtcagtaagttttaaataaccactaaaactattcacttcaatagtctgaacaactggtgtaagttccatctctaattgaggttgaacctcaacaattgtttgaatagtagttgtctgattgtcctcactgccgtcttgttgaccaacagtttgttgactatcatcatctaaccaatcttcttcttgctcttcttcaggttgaagagcagcagaagtggcaccaaattccaaaggtttaccttggtaatcatcttcagtaccatactcatattgagttgatggctcaaactcttcttcttcacaatcaccttcttcttcatcctcatctggagggtagaaagaacaatacatatgtgaagccaatttaaactcaccagactcatcaaataagtagtatgtagccatactccactcatctaaatcaatgcccagtggtgtaagtaattcagatactggttgcaaagtttttatgacagcatctgccacaacacaggcgaactcatttacttctgtaccgagttcaactgtataggcagagcacttctcattaagtactttatcaatcctttcatcaagttcaaaagtgatattcacactcttgtaaccttgcacttctatcacagtgtcatcaccaaaagtaacctttgttggtgcaccgcctttgagtgtgaaggtattgtttgttaccatcatattaggtgcaagggcacagtacttttctgtgtctttgatttcgagcaacataagcccgttaatacaaactggtgtaccaaccaatggagcttcaacagcttcactagtaggttgttctaatggttgtaaatcaccagttttcaagacaacttcctctgttaacacttctgtgggaagtgtttctccctctaagaagataatttcttttggggcttttagaggcatgagtaggccagtttcttctctggatttaacacactttctgtacaatccctttgagtgcgtgacaaatgtttcacctaaattcaaggctttaagtttagctccaccaataatgatagagtcagcacacaaagccaaaaatttatttacaagcttaaagaatgtctgaacactctccttaatttcctttgcacaggtgacaatttgtccaccgacaatttcacaagcacaggttgagataaatttaacaatttcccaaccgtctctaagaaactctacaccttccttaaacttctcttcaagccaatcaaggacgggtttgagtttttcataaacagtgccaaagatgttagttagccactgcgaagtcaactgaacaacaccacctgtaatgtaggccattacaactagattgttagtagccaaatcagatgtgaacatcatagcatcaatgagtctcagtgaatactgtgaaattccatctagtattgttatagcggccttctgtaaaacacgcacagaattttgagcagtttcaagagtgcgggagaaaattgatcgtacaacacgagcagcctctgatgcaaatgcataaagaggactcagtattgatttctgttcaccaatattccaggcaccttttttagcttttccttttgtaactttaaaattaccacaggattcaacaatttgtttgaatgctttataatccaaacctttcacagtttccacaaaagcacttgtggaagcagaaaaagatgccaaaataatggcgatctcttcattaagtttaaagtcaccaacaatattgatgttgactttctctttttggagtatttcaagaaggttgtcattaagaccttcggaaccttctccaacaacacctgtatggttacaacctatgttagcgctagcacgtggaacccaataggcacacttgttatggcaaccaacataagagaacacacagcctccaaaggcaatagtgcgaccacccttacgaagaatggttttcaagccagattcattatggtattcggcaagactatgctcaggtcctacttctgaattgtgacatgctggacaataaattttaacaacagcattttggggtaagtaaccacaagtagtggcaccttctttagtcaaattctcagtgccacaaaattcgcaagtggctttaacaaaatcgcccgtctgccatgaagtttcaccacaatgatcacacttcatgagagttgaaaggcacatttggttgcattcatttggtgacgcaactggatagacagatcgaattctacccataaagccatcaagctttttcttttcaacccttggttgaatagtcttgattatggaatttaagggaaatacaaaatttggacattccccattgaaggtgtcaaatttctttgccaatttaatttcaaaaggtgtctgcaattcatagctcttttcagaacgttccgtgtaccaagcaatttcatgctcatgttcacggcagcagtatacacccctcttagtgtcaataaagtccagttgttcggacaaagtgcatgaagctttaccagcacgtgctagaaggtctttaatgcactcaagagggtagccatcagggccacagaagttgttatcgacatagcgagtgtatgcccctccgttaagctcacgcatgagttcacgggtaacaccactgctatgtttagtgttccagttttcttgaaaatcttcataaggatcagtgccaagctcgtcgcctaagtcaaatgactttagatcggcgccgtaactatggccaccagctcctttattaccgttcttacgaagaagaaccttgcggtaagccactggtatttcgcccacatgagggacaaggacaccaagtgtctcaccactacgaccgtactgaatgccttcgagttctgctaccagctcaaccataacatgaccatgaggtgcagttcgagcatccgaacgtttgatgaacacatagggctgttcaagttgaggcaaaacgcctttttcaacttctactaagccacaagtgccatctttaagatgttgacgtgcctctgataagacctcctccacggagtctccaaagccacgtacgagcacgtcgcgaacctgtaaaacaggcaaactgagttggacgtgtgttttctcgttgaaaccagggacaaggctctccatcttacctttcggtcacacccggacgaaacctagatgtgctgatgatcggctgcaacacggacgaaaccgtaagcagcctgcagaagatagacgagttactcgtgtcctgtcaacgacagtaattagttattaattatactgcgtgagtgcactaagcatgcagccgagtgacagccacacagattttaaagttcgtttagagaacagatctacaagagatcgaaagttggttggtttgttacctgggaaggtataaacctttaat

SEQ ID NO: 8 - protein, 1255 aa, Severe acute respiratory syndrome coronavirus 2
MFIFLLFLTLTSGSDLDRCTTFDDVQAPNYTQHTSSMRGVYYPDEIFRSDTLYLTQDLFLPFYSNVTGFHTINHTFGNPVIPFKDGIYFAATEKSNVVRGWVFGSTMNNKSQSVIIINNSTNVVIRACNFELCDNPFFAVSKPMGTQTHTMIFDNAFNCTFEYISDAFSLDVSEKSGNFKHLREFVFKNKDGFLYVYKGYQPIDVVRDLPSGFNTLKPIFKLPLGINITNFRAILTAFSPAQDIWGTSAAAYFVGYLKPTTFMLKYDENGTITDAVDCSQNPLAELKCSVKSFEIDKGIYQTSNFRVVPSGDVVRFPNITNLCPFGEVFNATKFPSVYAWERKKISNCVADYSVLYNSTFFSTFKCYGVSATKLNDLCFSNVYADSFVVKGDDVRQIAPGQTGVIADYNYKLPDDFMGCVLAWNTRNIDATSTGNYNYKYRYLRHGKLRPFERDISNVPFSPDGKPCTPPALNCYWPLNDYGFYTTTGIGYQPYRVVVLSFELLNAPATVCGPKLSTDLIKNQCVNFNFNGLTGTGVLTPSSKRFQPFQQFGRDVSDFTDSVRDPKTSEILDISPCSFGGVSVITPGTNASSEVAVLYQDVNCTDVSTAIHADQLTPAWRIYSTGNNVFQTQAGCLIGAEHVDTSYECDIPIGAGICASYHTVSLLRSTSQKSIVAYTMSLGADSSIAYSNNTIAIPTNFSISITTEVMPVSMAKTSVDCNMYICGDSTECANLLLQYGSFCTQLNRALSGIAAEQDRNTREVFAQVKQMYKTPTLKYFGGFNFSQILPDPLKPTKRSFIEDLLFNKVTLADAGFMKQYGECLGDINARDLICAQKFNGLTVLPPLLTDDMIAAYTAALVSGTATAGWTFGAGAALQIPFAMQMAYRFNGIGVTQNVLYENQKQIANQFNKAISQIQESLTTTSTALGKLQDVVNQNAQALNTLVKQLSSNFGAISSVLNDILSRLDKVEAEVQIDRLITGRLQSLQTYVTQQLIRAAEIRASANLAATKMSECVLGQSKRVDFCGKGYHLMSFPQAAPHGVVFLHVTYVPSQERNFTTAPAICHEGKAYFPREGVFVFNGTSWFITQRNFFSPQIITTDNTFVSGNCDVVIGIINNTVYDPLQPELDSFKEELDKYFKNHTSPDVDLGDISGINASVVNIQKEIDRLNEVAKNLNESLIDLQELGKYEQYIKWPWYVWLGFIAGLIAIVMVTILLCCMTSCCSCLKGACSCGSCCKFDEDDSEPVLKGVKLHYT

SEQ ID NO: 9 - protein, 422 aa, Severe acute respiratory syndrome coronavirus 2
MSDNGPQSNQRSAPRITFGGPTDSTDNNQNGGRNGARPKQRRPQGLPNNTASWFTALTQHGKEELRFPRGQGVPINTNSGPDDQIGYYRRATRRVRGGDGKMKELSPRWYFYYLGTGPEASLPYGANKEGIVWVATEGALNTPKDHIGTRNPNNNAATVLQLPQGTTLPKGFYAEGSRGGSQASSRSSSRSRGNSRNSTPGSSRGNSPARMASGGGETALALLLLDRLNQLESKVSGKGQQQQGQTVTKKSAAEASKKPRQKRTATKQYNVTQAFGRRGPEQTQGNFGDQDLIRQGTDYKHWPQIAQFAPSASAFFGMSRIGMEVTPSGTWLTYHGAIKLDDKDPQFKDNVILLNKHIDAYKTFPPTEPKKDKKKKTDEAQPLPQRQKKQPTVTLLPAADMDDFSRQLQNSMSGASADSTQA

SEQ ID NO: 10 - protein, 221 aa, Severe acute respiratory syndrome coronavirus 2
MADNGTITVEELKQLLEQWNLVIGFLFLAWIMLLQFAYSNRNRFLYIIKLVFLWLLWPVTLACFVLAAVYRINWVTGGIAIAMACIVGLMWLSYFVASFRLFARTRSMWSFNPETNILLNVPLRGTIVTRPLMESELVIGAVIIRGHLRMAGHSLGRCDIKDLPKEITVATSRTLSYYKLGASQRVGTDSGFAAYNRYRIGNYKLNTDHAGSNDNIALLVQ

SEQ ID NO: 11 - protein, 76 aa, Severe acute respiratory syndrome coronavirus 2
MYSFVSEETGTLIVNSVLLFLAFVVFLLVTLAILTALRLCAYCCNIVNVSLVKPTVYVYSRVKNLNSSEGVPDLLV

SEQ ID NO: 12 - protein, 805 aa, Homo sapiens [sequence omitted]

SEQ ID NO: 13 - protein, 178 aa, unidentified
  source 1..178: note = Description of Unknown: IL-10 sequence
MHSSALLCCLVLLTGVRASPGQGTQSENSCTHFPGNLPNMLRDLRDAFSRVKTFFQMKDQLDNLLLKESLLEDFKGYLGCQALSEMIQFYLEEVMPQAENQDPDIKAHVNSLGENLKTLRLRLRRCHRFLPCENKSKAVEQVKNAFNKLQEKGIYKAMSEFDIFINYIEAYMTMKIRN

SEQ ID NO: 14 - protein, 212 aa, unidentified
  source 1..212: note = Description of Unknown: IL-6 sequence
MNSFSTSAFGPVAFSLGLLLVLPAAFPAPVPPGEDSKDVAAPHRQPLTSSERIDKQIRYILDGISALRKETCNKSNMCESSKEALAENNLNLPKMAEKDGCFQSGFNEETCLVKIITGLLEFEVYLEYLQNRFESSEEQARAVQMSTKVLIQFLQKKAKNLDAITTPDPTTNASLLTKLQAQNQWLQDMTTHLILRSFKEFLQSSLRALRQM

SEQ ID NO: 15 - protein, 233 aa, unidentified
  source 1..233: note = Description of Unknown: TNF-a sequence
MSTESMIRDVELAEEALPKKTGGPQGSRRCLFLSLFSFLIVAGATTLFCLLHFGVIGPQREEFPRDLSLISPLAQAVRSSSRTPSDKPVAHVVANPQAEGQLQWLNRRANALLANGVELRDNQLVVPSEGLYLIYSQVLFKGQGCPSTHVLLTHTISRIAVSYQTKVNLLSAIKSPCQRETPEGAEAKPWYEPIYLGGVFQLEKGDRLSAEINRPDYLDFAESGQVYFGIIAL

SEQ ID NO: 16-100 - skipped (85 entries)

SEQ ID NO: 101 - DNA, 6462 bp, Sin Nombre orthohantavirus
  source 1..6462: mol_type = unassigned DNA
atggaaaaatatagggagattcatcaaagagtcaaggagattcctcctgggggggcttctgcattagaatgtttagatttgcttgaccgtctttatgcagtcagacatgatgtagttgatcagatgatcaagcatgattggtctgacaataaagatatggaaagacctataggtcaagttctgttaatggctggtgtaccaaatgatgtgattcaaggtatggagaagaaagttatacctacaagcccttcaggacagattttaaaaagctttttccgcatgacacctgataattataaaatcacaggtgccttaattgagtttatcgaggtaacagtgactgcagatgttgctaaaggtatccgtgaaaagaaattaaagtatgagagtggtcttcagtttgtggagtctttattaagtcaagaacacaaaaaaggtaatataaatcaagcttataagatcacatttgatgttgtggctgtaaagacggatggttcaaacatatcaactcaatggcctagtcggcgtaatgatggtgttgttcaacatatgaggcttgttcaggctgatattaattatgttagagaacatctcattaagcctgatgaacgtgcatcattagaagccatgtttaatcttaagtttcatgtaggaggccctaaactgaggtattttaatataccagattacaagcctcagtcattatgtcaacctgagattacgaatttaattcaatattgcaagcactggctcacagaagatcatgattttgtttttaaggaagtcacgggtaataatgttatgaactcatttgagaataatgaaagtgtatatatgtctagatacagggagtctcgtaaaccacgtaatttcttattaattcaaggttctattcaaggtccttatttaccatcaactattagctctgaccagtgtgacacaagaattggctgtttggaggtgttaaaagtacatccagagacaccagtacaagcaattgcagtggatatggcatataagtatatggagttaaatagagatgagatcatcaactactacaatcctagagttcattttcaagcaactcagtcagtgaaggaaccaggtacattcaaattaggactttctcaactaaatccgatgtctaaatcaatattggaccaggttgggaaacacaagtcagaaaagggcctttttggtgaaccattagagagtataaacatatcaagccagattcaacagaatgagtgttcacgtattatagaatcaatactttcaaatctcgaaataaatgttggtgaggtaacaatgagtctagctaatcctcgtaaaactacaggtgtagatgagttgttaggtaagttctatgagaatgaactgtctaagtatttgatcagcatattacgaaaaactgcagcctggcatattgggcatttaataagagatataacagaaagtctcattgctcatgcaggtttaaagcggtctaaatactggtcaatccatgcttatgatcatggtggggtaatattgttcatccttccttcaaagtctttagaggttgtcggatcttatattcggtatttcacagtattcaaagatggtatagggcttatagatgaggaaaatttagactcaaaggtagacatcgacggtgtgcagtggtgtttttcaaaagtaatgagtattgacttaaacaggttgttagctttaaatattgcctttgaaaaggcacttcttgctactgccacttggtttcaatattacacagaagaccaagggcattttccattacaacatgcattaaggtctgtgttctcttttcattttttattatgtgtttctcagaaaatgaagatatgtgcaatttttgataatttacgctatttgatcccagctgtcacatcattatattcaggttatgagctcttaatagaaaaattctttgagcggccgtttaagagtgccttagaagtatatttatataatataataaaagcattgcttataagcctagcacaaaataataaggtacgattctactctaaagtgcgtcttcttggcctcactgtcgatcactcaactgtaggtgcaagtggagtttatccttcattgatgtctagagttgtttataagcactatcgtagtcttatttctgaagcaacaacatgtttctttctttttgaaaagggcctacacggaaatctaaatgaggaggctaaaatacatcttgagactgtagagtgggcaagaaaatttgaggcaaaagagagaaaatatggagacatattaatgagggaaggttacacgattgatgctatacgtgttggtgatgtgcaggtagaacaacaattattttgtcaagaggttgtggagttaagtgcagaagaactcaacaagtatttacaagcaaaaagtcaggtcttatcatccaatatcatgaataaacattgggataagccgtattttagtcagacaaggaatataagtttaaagggtatgtctggagcattgcaagaagatggacatcttgcagcaagtgttacgttaattgaggcaattagatttttaaatagatcacagactaatccaaacgttattgacatgtatgaacagacaaagcagcacaaagctcaagcacgtattgtgaggaaatatcagcggaccgaagctgatagaggttttttcatcactactctcccgacaagagtcaggttagaaattatagaagattattatgatgcaatagctagagttgtcccagaggaatatatatcatacggaggagacaagaaaattctaaatatacagactgcattagagaaggcattacgatgggcttcaggatcatcagaggtcataacaagcacaggaaatgtaattaaattcaagaggaggctgatgtatgtgagtgctgatgccacgaaatggtcaccaggagataattcggcaaagtttaagagattcacacaggcattatatgatggcttgtcagatgagaagttaaaatgttgcgttgttgatgcccttagacatgtttatgaaacagagttctttatgtccagaaaacttcatcgctatatagattctatggatgagcattctgaggctgtccaagatttcctcgatttttttaagggtggagtgtctgctacagtcaaaggtaattggctccaaggtaacttgaacaaatgttcttcattgtttggggctgcagtgtcactgctgtttaggcgtatttgggcagagttatttccagaattagaatgcttttttgagtttgcacatcactcagatgatgccctctttatttatggttatttagagccagaagatgatggaactgattggtttttatatgtatctcaacagatacaggctggtaattatcactggcatgctgttaaccaagagatgtggaagagcatgtttaatttgcatgagcatttactgctgatgggctccataaaggtatccccaaaaaagacaacagtttctcctacaaatgcagaatttctttccacattttttgaaggttgtgcggtgtcaatcccttttataaaaatactgcttggatcgttatcagatttaccaggattaggattctttgatgatctggctgctgcacaaagtagatgtgtcaaagcaatggacttaggggcatccccacagttggcacaattagctgttgttatttgcactagtaaagttgagagattatacggcactgcagatgggatggttaatagtccagtggcatttttaaaggtaacgaaggcccatgtacccatacctttaggaggtgatggctcaatgtctattatggagcttgccacagcaggtataggtatggctgataaaaatattctcaagcaagcattttattcttacaagcatacaagacgtgatggggataggtatgttttgggtcttttcaagttcttaatgtctcttagtgaagatgtttttcagcatgatagactaggtgagtttagttttgttggtaaagttcagtggaaggtattcacacctaaaaatgagtttgaattctttgatcaattttcacagtcctacttaaagagttggacaaatcaacacccagtatatgattatattatacctagaggtagggataatcttttagtctatttagtcagaaaattaaatgaccctagtattgtcacagctatgacaatgcaatctccattacaacttagattcaggatgcaggcaaagcagcacatgaaagtgtgtaagcttgaaggggaatgggtgacattcagagaagttttagctgcagcagacagttttgcaactaagtacaatcccacagaaaaggacttagatctgtttaatacattagttagttgtacattttctaaagagtatgcatggaaagatttcttgaacgaagttaggtgtgaagtggtacctacaaaacatgtccatcggtcaaaaatcgcaagaacttttacagtgcgtgagaaggatcaagctattcagaatccaattactgctgttatagggtataaatatgcttcaactgtagatgaaatcagtgatgttttagatagttccttttttcctgattcattatctgctgaccttcaagtcatgaaggaaggtgtgtatagagagctgggtttagatataggtcttcctgaggtgttgaagcgaatagcaccacttttgtacaaagctgggagatctagagttgttatagtggaaggcaacgtagagggcacagcagaatcaatttgtagctattggcttcgtagcatgtcattggtcaaaacaatcaaagtacgtccaaaaaaagaagtgctcagagcagtttcactatatagcacaaaggaaaatattgggttacaagatgatgttgcagctacacgattgtgtatagaagtctggagatggtgcaaagctaatgatcagaatgtaaatgactggttaaatgcactgtactttgaaaagcaaactctcatggattgggtagaaaggttccgtagaaaaggagtggttcctattgaccctgaaattcagtgtattgccttactactttatgatgtgttaggttataagagtgtattgcagatgcaggcaaataggcgagcatattcagggaaacagtatgatgcatattgtgttcaaacgtataatgaagaaacaagactctatgagggagatttaagggtcacatttaattttggccttgattgtgcaaggttggaaatcttttgggataagaaagaatatattcttgaaacatcaattacgcaacgtcatgttttaaagttgatgatggaggaagtcacacaagaattgttaaggtgtgggatgagatttaagacagagcaagtaagtcatacgaggagtttggttttattcaaaacggaatcagggtttgagtggggtaaaccaaatgtgccgtgtatagtcttcaagcattgtgctttgcgtacaggtttaaggactaagcaagctattaataaagagttcatgataaatgtccaagcagatgggtttagagctatagcacagatggatatggaaagtccgagatttctattagcacatgcttatcatacattacgtgatgtgcgttaccaagctgtgcaggctgtaggcaatgtgtggtttcaaactgctcaacataaattattcataaatccaataatatcatccgggttgttagaaaactttatgaaaggcttgccagcagcaattcctcctgcagcttattctttaattatgaataaggctaagatatctgtagatttatttatgttcaatgagttgctggctttagttaacccaagaaatgttctcaatttggacggaatagaagagacttcagaaggatatagtacagtaacctctatatctagccgacaatggtctgaagaggtaagtcttatggctgatgatgacattgatgatgaagaagaatttacaatagctcttgatgatatagactttgagcagatcaatcttgatgaggacatccaacattttttgcaagatgaatcagcttatactggtgatttaacaatacaaacagaggaagttgaggtaaaaaggataaggggtgtaacgcgcgtgcttgaaccagttaagctaattaagagctgggtttcgaaagggcttgctatcgataaagtgtataaccctatagggatagtgctgatggcaaggtacatgtcaaagaattatgattttagcaaaattcccctagctttattaaacccatatgatttaactgagtttgaaagtgttgtcaaaggctggggtgaaactgttaatgacagatttctagaggttgacaatgatgcacaacggttggtccgagagaaaaacatattgcccgaagacatattaccagattcattattttcttttaggcacgttgatgtgttgttaaagagactattccctcatgaccctgtgtcttcattctattaa

SEQ ID NO: 102 - DNA, 1287 bp, Sin Nombre orthohantavirus
  source 1..1287: mol_type = unassigned DNA
atgagcaccctcaaagaagtgcaagacaacatcactctccacgaacaacaactcgtgactgccaggcagaagctcaaagatgcagaaagagcggtggaattggaccccgatgatgttaacaaaagcacattacagagcagacgggcagctgtgtctgcattggagaccaaactcggagaacttaagcgggaactggctgatcttattgcagctcagaaattggcttcaaaacctgttgatccaacagggattgaacctgatgaccatctaaaggaaaagtcatcattgagatatggaaatgtccttgatgtaaattccattgacttagaagagccaagtgggcaaacagctgattggaaatccatcggactctacattctaagtttcgcattaccgattattcttaaagccttgtacatgttatctactaggggccgtcaaacaatcaaagaaaacaagggaacaagaattcgattcaaggatgattcatcttatgaagaagtcaatgggatacgtaagccaagacatctgtatgtttctatgccaactgcccagtctacaatgaaagcagatgagattactcccgggaggttccgtacaattgcttgtggattattcccagcccaagtcaaagcaaggaatattatcagtcctgtcatgggtgtgattggctttagtttttttgtgaaagattggatggaaaggattgatgacttcctggctgcacgttgcccatttctgcctgagcagaaagaccctagagatgctgcattggcaactaatagagcctattttataacacgtcaattacaggttgatgagtcaaaggttagtgatattgaggacctgattgctgatgcaagggctgagtctgccactatattcgcagatattgctactcctcattcagtttgggtctttgcatgtgctccagatcgttgtccacctacagcattatatgtggccgggatgccggaactgggtgcattttttgctattctccaggatatgaggaacaccataatggcatccaaatctgtggggacatctgaagagaaattgaagaagaaatcagcattctaccagtcatacttaagacgtactcagtcaatgggaattcaactggaccagaagataatcatcttatacatgagccattggggaagagaggccgtgaatcacttccatcttggagatgatatggatcctgagcttagggaacttgcccagacccttgtagatatcaaggtcagggaaatctctaaccaagaaccacttaaactttaa

SEQ ID NO: 103 - DNA, 192 bp, Sin Nombre orthohantavirus
  source 1..192: mol_type = unassigned DNA
atgcagaaagagcggtggaattggaccccgatgatgttaacaaaagcacattacagagcagacgggcagctgtgtctgcattggagaccaaactcggagaacttaagcgggaactggctgatcttattgcagctcagaaattggcttcaaaacctgttgatccaacagggattgaacctgatgaccatctaa

SEQ ID NO: 104 - DNA, 3423 bp, Sin Nombre orthohantavirus
  source 1..3423: mol_type = unassigned DNA
atggtagggtgggtttgcatcttcctcgtggtccttactactgcaactgctgggctaacacggaatctttatgagttgaagatagaatgtccacatactgtgggtttaggtcagggttacgtgacaggttcagtggaaattacacctattctcttaacgcaggtagctgatctgaagattgagagttcttgtaatttcgatttgcatgtcccggctaccactacccaaaaatacaatcaggttgactggaccaaaaaaagttcaactacagaaagcacaaatgcaggtgcaactacatttgaggctaaaacaaaagagataaatttgaaaggcacatgtaatattcctccaactacatttgaagctgcatataaatcaaggaagacagtaatttgttatgatttagcctgtaatcaaacacattgtcttcctacggtccatttgattgctcctgttcaaacgtgcatgtctgtgcggagctgtatgataggtttgctgtcaagcaggattcaagtgatatatgagaagacatactgcgttacaggtcaattaatagaggggctatgtttcatcccaacacatacaattgcactcacacaacctggtcatacctatgatactatgacattgccagtgacttgttttttagtagctaaaaagttgggaacacagcttaagctggctgttgagttagagaaactgattactggtgtaagttgcacagaaaacagctttcaaggttactacatctgttttatcgggaaacattcagagcccttatttgtgccaacaatggaggattataggtcagctgagttatttacccgtatggttttaaatccgagaggtgaagatcatgaccctgatcaaaatggacaaggtttaatgagaatagctgggcctgttacagctaaggtgccatctacagaaacaactgaaacaatgcaaggaattgcatttgctggagcaccaatgtatagctctttctcaaccctcgtgaggaaggctgatcctgagtatgtcttctcaccaggtataattgcagaatcaaatcatagtgtttgtgataaaaaaacagtaccccttacatggacagggtttttggcagtttctggagagatagagaaaataacaggctgtacagtcttctgtacattggctggacctggtgctagttgtgaagcatactcagaaacaggaatctttaatataagttctcctacttgtctagtgaataaagttcaaaaattcagaggctcagaacagaggattaacttcatgtgccaaagagttgatcaagatgtagttgtctattgtaatggacaaaagaaagtcattcttaccaaaactctggtcataggccaatgcatttatacattcactagtttattctcactaatcccaggagttgcccattctcttgctgtagagctatgtgttccaggccttcatggctgggctacaacggcattactgattactttttgctttggctggctccttataccggcagtcaccttaattatactgaagatcctgaggttgctcactttctcatgctcacattattccacagaatcaaaattcaaagttatcttagaaagggttaaggttgaatatcagaaaacaatgggctctatggtgtgtgatatttgccaccacgaatgcgaaacagcaaaagaacttgaaacacataagaaaagctgtccagaaggtcaatgcccgtattgtatgacaataactgaatccactgagagtgctctccaagcccattttgcaatctgtaagctaacaaacaggtttcaggaaaacttaaaaaagtcattgaaacgcccagaagtacggaaaggttgttacaggacactgggagtttttagatacaagagcagatgttatgttggtttagtatggggaattcttttaacaactgaactgatcatatgggcagccagtgcagacacccctttaatggagtctggttggtctgacacagcacatggtgtgggcataattcctatgaagacagatttggagcttgattttgcattggcctcatcatcttcttacagttataggcgaaagcttgttaatcctgctaatcaagaagaaacactcccttttcatttccagttagataaacaagtagtgcatgcagagatccagaacctaggacattggatggatggcacattcaacataaaaactgcttttcactgttatggggagtgtaaaaaatatgcctatccttggcaaacagccaagtgtttctttgaaaaggattatcaatatgaaacaagttggggctgtaatccaccagactgtccaggggtaggtacaggttgtacagcttgtggggtgtaccttgataagctccgttcggttgggaaagcgtacaagatagtatcactcaaatatacacggaaggtgtgtattcaattaggaacagaacaaacttgtaaacatatagatgtaaatgattgcctggttaccccttctgtcaaagtttgtatgattggtactatatcaaagctccagccaggtgataccttgttgttcttaggtcctttagagcagggtgggatcattcttaagcaatggtgtacaacatcatgtgtgtttggagatcccggtgatattatgtcaacaacaagtgggatgcggtgcccagaacatactggatcttttagaaagatctgtgggtttgctacgacaccaacatgtgagtatcaaggcaacacagtgtctggattccaacgcatgatggcaactcgagattctttccagtcattcaatgtgacagaaccacatatcactagcaaccgacttgagtggattgatccagatagcagtatcaaagatcacattaatatggttttaaatcgagatgtttcctttcaggatctaagtgataacccatgcaaggttgacctgcatacacaatcaattgacggggcctggggttcaggagtaggttttacgttggtatgtactgtggggcttacagagtgtgcaaattttataacttcaattaaagcatgtgattctgccatgtgttatggagccacagtgacaaatctgcttagagggtctaacacagttaaagttgttggtaaaggtgggcattctggatctttgtttaaatgctgccatgatactgactgtaccgaagaagggttagcagcatctccaccacatttagacagggttacaggctataatcaaatagattctgataaagtttatgatgacggtgcaccgccctgtacaatcaagtgctggttcaccaagtcaggtgaatggctgttgggaatccttaatggcaattgggtggtagttgctgttctgattgtaattttgatattatcgatactcctttttagctttttttgtcctgtcagaagtagaaagaataaagctaattag

SEQ ID NO: 105-150 - skipped (46 entries)

SEQ ID NO: 151 - protein, 2153 aa, Sin Nombre orthohantavirus
MEKYREIHQRVKEIPPGGASALECLDLLDRLYAVRHDVVDQMIKHDWSDNKDMERPIGQVLLMAGVPNDVIQGMEKKVIPTSPSGQILKSFFRMTPDNYKITGALIEFIEVTVTADVAKGIREKKLKYESGLQFVESLLSQEHKKGNINQAYKITFDVVAVKTDGSNISTQWPSRRNDGVVQHMRLVQADINYVREHLIKPDERASLEAMFNLKFHVGGPKLRYFNIPDYKPQSLCQPEITNLIQYCKHWLTEDHDFVFKEVTGNNVMNSFENNESVYMSRYRESRKPRNFLLIQGSIQGPYLPSTISSDQCDTRIGCLEVLKVHPETPVQAIAVDMAYKYMELNRDEIINYYNPRVHFQATQSVKEPGTFKLGLSQLNPMSKSILDQVGKHKSEKGLFGEPLESINISSQIQQNECSRIIESILSNLEINVGEVTMSLANPRKTTGVDELLGKFYENELSKYLISILRKTAAWHIGHLIRDITESLIAHAGLKRSKYWSIHAYDHGGVILFILPSKSLEVVGSYIRYFTVFKDGIGLIDEENLDSKVDIDGVQWCFSKVMSIDLNRLLALNIAFEKALLATATWFQYYTEDQGHFPLQHALRSVFSFHFLLCVSQKMKICAIFDNLRYLIPAVTSLYSGYELLIEKFFERPFKSALEVYLYNIIKALLISLAQNNKVRFYSKVRLLGLTVDHSTVGASGVYPSLMSRVVYKHYRSLISEATTCFFLFEKGLHGNLNEEAKIHLETVEWARKFEAKERKYGDILMREGYTIDAIRVGDVQVEQQLFCQEVVELSAEELNKYLQAKSQVLSSNIMNKHWDKPYFSQTRNISLKGMSGALQEDGHLAASVTLIEAIRFLNRSQTNPNVIDMYEQTKQHKAQARIVRKYQRTEADRGFFITTLPTRVRLEIIEDYYDAIARVVPEEYISYGGDKKILNIQTALEKALRWASGSSEVITSTGNVIKFKRRLMYVSADATKWSPGDNSAKFKRFTQALYDGLSDEKLKCCVVDALRHVYETEFFMSRKLHRYIDSMDEHSEAVQDFLDFFKGGVSATVKGNWLQGNLNKCSSLFGAAVSLLFRRIWAELFPELECFFEFAHHSDDALFIYGYLEPEDDGTDWFLYVSQQIQAGNYHWHAVNQEMWKSMFNLHEHLLLMGSIKVSPKKTTVSPTNAEFLSTFFEGCAVSIPFIKILLGSLSDLPGLGFFDDLAAAQSRCVKAMDLGASPQLAQLAVVICTSKVERLYGTADGMVNSPVAFLKVTKAHVPIPLGGDGSMSIMELATAGIGMADKNILKQAFYSYKHTRRDGDRYVLGLFKFLMSLSEDVFQHDRLGEFSFVGKVQWKVFTPKNEFEFFDQFSQSYLKSWTNQHPVYDYIIPRGRDNLLVYLVRKLNDPSIVTAMTMQSPLQLRFRMQAKQHMKVCKLEGEWVTFREVLAAADSFATKYNPTEKDLDLFNTLVSCTFSKEYAWKDFLNEVRCEVVPTKHVHRSKIARTFTVREKDQAIQNPITAVIGYKYASTVDEISDVLDSSFFPDSLSADLQVMKEGVYRELGLDIGLPEVLKRIAPLLYKAGRSRVVIVEGNVEGTAESICSYWLRSMSLVKTIKVRPKKEVLRAVSLYSTKENIGLQDDVAATRLCIEVWRWCKANDQNVNDWLNALYFEKQTLMDWVERFRRKGVVPIDPEIQCIALLLYDVLGYKSVLQMQANRRAYSGKQYDAYCVQTYNEETRLYEGDLRVTFNFGLDCARLEIFWDKKEYILETSITQRHVLKLMMEEVTQELLRCGMRFKTEQVSHTRSLVLFKTESGFEWGKPNVPCIVFKHCALRTGLRTKQAINKEFMINVQADGFRAIAQMDMESPRFLLAHAYHTLRDVRYQAVQAVGNVWFQTAQHKLFINPIISSGLLENFMKGLPAAIPPAAYSLIMNKAKISVDLFMFNELLALVNPRNVLNLDGIEETSEGYSTVTSISSRQWSEEVSLMADDDIDDEEEFTIALDDIDFEQINLDEDIQHFLQDESAYTGDLTIQTEEVEVKRIRGVTRVLEPVKLIKSWVSKGLAIDKVYNPIGIVLMARYMSKNYDFSKIPLALLNPYDLTEFESVVKGWGETVNDRFLEVDNDAQRLVREKNILPEDILPDSLFSFRHVDVLLKRLFPHDPVSSFY

SEQ ID NO: 152 - protein, 428 aa, Sin Nombre orthohantavirus
MSTLKEVQDNITLHEQQLVTARQKLKDAERAVELDPDDVNKSTLQSRRAAVSALETKLGELKRELADLIAAQKLASKPVDPTGIEPDDHLKEKSSLRYGNVLDVNSIDLEEPSGQTADWKSIGLYILSFALPIILKALYMLSTRGRQTIKENKGTRIRFKDDSSYEEVNGIRKPRHLYVSMPTAQSTMKADEITPGRFRTIACGLFPAQVKARNIISPVMGVIGFSFFVKDWMERIDDFLAARCPFLPEQKDPRDAALATNRAYFITRQLQVDESKVSDIEDLIADARAESATIFADIATPHSVWVFACAPDRCPPTALYVAGMPELGAFFAILQDMRNTIMASKSVGTSEEKLKKKSAFYQSYLRRTQSMGIQLDQKIIILYMSHWGREAVNHFHLGDDMDPELRELAQTLVDIKVREISNQEPLKL

SEQ ID NO: 153 - protein, 63 aa, Sin Nombre orthohantavirus
MQKERWNWTPMMLTKAHYRADGQLCLHWRPNSENLSGNWLILLQLRNWLQNLLIQQGLNLMTI

SEQ ID NO: 154 - protein, 1140 aa, Sin Nombre orthohantavirus
MVGWVCIFLVVLTTATAGLTRNLYELKIECPHTVGLGQGYVTGSVEITPILLTQVADLKIESSCNFDLHVPATTTQKYNQVDWTKKSSTTESTNAGATTFEAKTKEINLKGTCNIPPTTFEAAYKSRKTVICYDLACNQTHCLPTVHLIAPVQTCMSVRSCMIGLLSSRIQVIYEKTYCVTGQLIEGLCFIPTHTIALTQPGHTYDTMTLPVTCFLVAKKLGTQLKLAVELEKLITGVSCTENSFQGYYICFIGKHSEPLFVPTMEDYRSAELFTRMVLNPRGEDHDPDQNGQGLMRIAGPVTAKVPSTETTETMQGIAFAGAPMYSSFSTLVRKADPEYVFSPGIIAESNHSVCDKKTVPLTWTGFLAVSGEIEKITGCTVFCTLAGPGASCEAYSETGIFNISSPTCLVNKVQKFRGSEQRINFMCQRVDQDVVVYCNGQKKVILTKTLVIGQCIYTFTSLFSLIPGVAHSLAVELCVPGLHGWATTALLITFCFGWLLIPAVTLIILKILRLLTFSCSHYSTESKFKVILERVKVEYQKTMGSMVCDICHHECETAKELETHKKSCPEGQCPYCMTITESTESALQAHFAICKLTNRFQENLKKSLKRPEVRKGCYRTLGVFRYKSRCYVGLVWGILLTTELIIWAASADTPLMESGWSDTAHGVGIIPMKTDLELDFALASSSSYSYRRKLVNPANQEETLPFHFQLDKQVVHAEIQNLGHWMDGTFNIKTAFHCYGECKKYAYPWQTAKCFFEKDYQYETSWGCNPPDCPGVGTGCTACGVYLDKLRSVGKAYKIVSLKYTRKVCIQLGTEQTCKHIDVNDCLVTPSVKVCMIGTISKLQPGDTLLFLGPLEQGGIILKQWCTTSCVFGDPGDIMSTTSGMRCPEHTGSFRKICGFATTPTCEYQGNTVSGFQRMMATRDSFQSFNVTEPHITSNRLEWIDPDSSIKDHINMVLNRDVSFQDLSDNPCKVDLHTQSIDGAWGSGVGFTLVCTVGLTECANFITSIKACDSAMCYGATVTNLLRGSNTVKVVGKGGHSGSLFKCCHDTDCTEEGLAASPPHLDRVTGYNQIDSDKVYDDGAPPCTIKCWFTKSGEWLLGILNGNWVVVAVLIVILILSILLFSFFCPVRSRKNKAN

SEQ ID NO: 155-200 - skipped (46 entries)

SEQ ID NO: 201 - DNA, 20019 bp, Avian coronavirus
  source 1..20019: mol_type = unassigned DNA
atggccccaggccttagcaagggagtatctcccaataaaaagaatgtcatttttgttttgaaggacattcaacctgcattgtgtgatgctttgttcttttatacatcacacactcctcgcgactttgctgatgctcatgccgttcgtgaacggtttgatcgcaatttacagagtggtcgcgtttttaaatttgaaactgtgtgtggccctgtttatttacagggtgtaccctcagtcccgccgggtgtgaaagctttgggttctgaatccaagcttgcagatttggaaagcctttttggtgtgtctcctctgtctaggcgttatagagatttgttgaagacggcaccccagtggtcgctaaatgttgaatctcttgatgctcaggcagaaaaattggacactctttttaattcttcagagattttgtggcttcaggtcgccgctaaggtccaagtgtctgctatggcactacgccttatggctaatgatgttgttaaccttgtaattgaagcattgggccaagaatttgcttctatgtttgctattgttcgcaagcaagttagagcagttttggacaaatgtcttatggtttttgaaaatgtcaaggagctcccacagcgcattgcagcacttaaagctgcattcgctgcttgtgtgaagcgcatgactgttgtggttgttgacaagtgtctcatgattcgtgagtttgcaggtacctgcctagccagtgtgaatgcgacaatggcagcatggtgtcgtgaattgccaactggttttatggggtctaaagtttttgacaaactcgccttctttaaggaggctgttgttaaaactgtaaaaaatgttgcccatgcaccggatggtgttactggttatagtgtcattggcaatgcccgcggtacgcaggttgtcattcgtggtatgcgtaatgacctcactctgcttgaacaacgtgcagatgtctctgttgaaaaagaaggttggtctgctgtctttgacggtagattaacctatgtttttaagagtggtgagtgttattatgcagcaccacttgcaggaaattttgttcttaatgatgtctattgttgtgagcgtgtagtcctccttagcgatggctacactcctgaaattaatgatggtttgcttttggcagcgctctacacgtcatctaatgtggctgatgtgttggctgcgctgaagaaaggtgaaccatttaagtttttgggacactcatttgtctatgttaaggacgctgccgtgtcttttactttggcaaagggtgcatctatagcagatgtttttaaactttttgttaaagaagctgttgatgtatggtctgtttttaacgaaaagtctcatgaattttggactaaagctcacaataaatgtcgtaatcttaaagatcttgtggcgacacattgttgtaaggcgcaagtgacttttgttgtgcttgctatagcccttggtgtgacagtttgggaaattgtcaaacaggttttgtttaaagttgctggtctttttacagccgttgtggacttttgtagtaaggcttggaatggattttgtgaccaactaatccatgctaaactttttgtgaatgaattgggctgtgttttggttggtgttaaaaatcactgttttcaacttttgcttatagcagtccatgccttttataaaaccttggagaagtgtgccataggtcgtatctggaatggtgatttgcttttttgggctggtggagcccataaagtaagtgaagacaatggtgaagtttggtttgatgctgtagacacaatgcaagttgacgaacagggcactgttgttgaagacaatgtgcctgattttgttgtttgtcatgatgtgtctataccagagcgtcaaaaaggttatatagtgcaaattgctgctgatggtaaaaactatatgttttttaggtatgaacagggtgttaatacctattatgccccaatgtcacaggttggtgcagttaatgtggtttgcagggctggtggtaagactgtgacctttggtgatgaccaggttaaagagctaccacccccagatgttaagtgtatctatattgatattgagtgttgtggtgaaccttggactagtgtctttaagcgtgtctataaagacccagttgaagttgagacatctttgactgtagaggagttgagagcagttgtctatgagatgatgtgtgacagtttaaaactgtttcctggtgcccctcaacctccaccatatgataatgtagctttggttgacaaccaaggtcgtgatttgcaaaacattgattcttgtcatttggtttatgtggattatgacagtgacggtgcagtttctgatgaagaagaagaagatgtgtctgacactgaagatgttaatgaagaggatgaacgtttggcatgtctcttgaagaattcagctaattttaaatatccacttccttatgatgatgagtatagtgtcttttgtggtcgtttggtacacaaggatgctatagacacccttcattacccatctggtgatgacatgtatgttattaataacgcctttgagggtgctgttaaggctttacctcagagtgttgttgatgttttgggagattggggtgtcgctgttgataatcaggagcgcgctatgaacaaggaaattcctgttgagattcctaaggaagaaactcagaaacctcaaaaggtggaagaacagaagcctagagaaactcttgttgagatttctaaggaagaaactcagaaacctcaaaaggtggaagagcagaagcctaaggaaacccttgttgagattcctaaggaagaaactcagaaacctcaaaaggtggaagagcagaagcctaaggaaactcctgttgagatycctaaggaagaaactcagaaacctcaaaaggtggaagagcagaagcctagggaaactcctgttgagactcctaaggaagaaactcagaaacctcaaaaggtggaagagcagaarcctaaggagactcttttaaataaacaattcttttctgatagttcttcggatgaagagccaaagaaaaagttgtttaggtttaaattgaagcctactaagtgtaaagtacctagtaatgttgagtattctacatgtgtaggcgacttgtctgtagttgttgccaaagctatggactcttttgaagactttgtcttggttaacgccgccaatgaacatatgtgtcatgcaggtggtgttgccaaggctattgcagatttttgtggtaacaagtttgtagactattgtgacacttttgttggtaaaaatggtcctcaacaacagttgttggccccctctggtgttgctagaatgcaagctgttaataatgtagtcggacccagacacgggcaacctgacttgtttgacaagttggttgctgcctataaaaaggttgttgttgttggtgctgttaattatgttgtccctgtcctttctgcaggaatctttggtgttgattataaaatgtctattgacgctatgcgcaaggcattttgtgatatgaaaattcgtgtgttgttgttttctcttaatcaagaacacattgattattttaatgccacttgtaaacagaagactgtttaccttactgaagatggcacttcttttaaaactctggtcttgaggccgggtgacacattgggccaccttggaggtgtttttgcgcgtaacaagactgtttttactgctgacgatgttagtgataaagaggttttgtttttgcctacaacagacaagaatgtgctggagcattatgatttagatgcccagaaatatgtcttgtttttgactacactttcgcaaaagtgggaagtgttttttaaaggtggtgttttgcaacttgtttggcgtgatggtaactgctgggttaatgcagttattacactgttgcaagctgcaaaaataaaatttaaaggttatttggcaacagcatgggcacaacttttgggtggtgaccctactgagtttgtagcatggtgttatgctagcactaatactaaggtgggtgactttggtgattccaatgttctcttgttgaccttggcgcaccattttagtgtagattacactaaagcccttatagttaggcgtgttgtgtgtaaatgtggtgttaatacgcaacaagtctatggcattaatgcttgtgtgcagcatgtttgtgccactaatatgttaaattttatgaaacagtatggtgactgttctgtctgtggtgaaaagtatgttgatgaagtcgtcaacataaatgtaccatatttgatgttgcttgcaggtggtggaccgcagaatgtggaccgcgatgagacagtggttgctaatatagtttttgttgggactattgatagtggccactgttatactcagactgcgaataatgtttttgacaatcttgttcaaaatagacagttctctaagagggctccctatataactgctttctaccctcaattttctcttaagagtaaaaattctctgtctgttgctaaaaagagtaagagcaagagtgatgtagtaaaagaagatgtttctaatctcgctacaggttccgacgttgaggttgaagatatttctaattttgaacgttggtattctgacaattattatgattgtttgactgtgcaggaagactctagccttcctgttgacaatactaattttgactttgttgtagattctaaattgcctcttacactcactgttcgtggtgtgtctagagatgtgaattttaaatctgcagaaggttttacgtacattttgacgccagagcgcggtcaaacatgtaattcacctgtttattactcttctcttgatttggttagccttagagctatctgggtcaatggggatagtaattatgtagttggtaatcccaattattatagtaggcttttgcgcattccaactttgtatgagaatgctgaaaagtttgttaatattggtgaacgtgtggggaatgttacttatggcgtttggcgtgccaaaagtttgaataaaccccagttgtctactgtaatggcttctgttaaagcaattataggcgttgcaaacccagtttctaatgttgtaggaaataccgtcaagaaggttgttgctgttagtgacggcttaggtgatggtgtttttggcaacatgtggggtggagtatgtggccttataggtggcacttgtaagtttgtctatgataaagtttcattgcactttataagaaccatgttgttgtttttgttttacttttgtaaagcaggttttaaaaaattttcttctaattaccgtagtgtaattactaaggtagttatgactgctttgttgttgtgttggtttgtgtatacttatgaagctattcactttgtgggtatacgcatattagattttttgtttgagggatctttttgtggtaattatactggttatggtaaagattcctttgacatgttgcggtattgcggagacgatgctgtctgtcgtgtttgtttgcactctgtagactcgttgcatctttataaacatgcgtatagtgtagagcaggtttataaagatgctgttgcagagtttaagtttacttggaattggctttatctagtgtttttggtactatttgtaaagccagttgcactatttgttatagtttgttattgtctcaagtaccttgtattaggcgctgaggtgttgcaaactggtattacaattgtggactggtgtgttgctacattttttagtcactttaattttatgggtgctagtttttatgtgtggattttgtggaaagtttatacatatgtccatcatataatgtattgtaaagacataacatgtgacatttgtagacgcgtggctcgcaatagtcgacatgaagttagtgttattgttaatgggcgtaagcagtcagtgtatgtttatactaattctggttttactttttgtaagaaacataattggtattgtaaaggttgtgacacttttgggcatcagaacacttttatttcacctgaagttgcaggtgagttgtctgataaacttaagcgtcatgttaagcctacttctagtgcatattttcttgttgatactgcacaattagttggtgactttgttaatcttaactatagttctaaggctcctggtttagaatctacaaagcagcaagttaagtgttttacagtttcagattttcttaagaatgctgtttttcttaaggatgctgtaaaatgtgaacgtatggctaatgatagctttattgtttgtaatacacagagtttgcatgatttggaggctgctaagaatgccgcggtttattatgcacactacctgtgtaagcccattcttattttggaccaagttctctatgatacattggcttgcgagcctgtttctaagagtcttgtagacaaagtgtgtggtgtattggcaaatattgttgaagttgattttgccaatcttaattataaggcaggttctttgcgtgacgctcttttgtctgtcacatcagatgaagaagctgttgatatggctatattttgtcataattatgaccttaattatactagtgatggttttactaatgttgtaccttcttatgggtttgaccttggtaaattgtcaccacgtgataagggttttcttataaatgctgatgcatgtatagccaatcttaaggttagaaatgccccagctgttgtttggaattattatgaccttataaaattgtctgataactgtcttaaatttttggtgtctggtgttataaagtcaggcgctaaattttatgtaacacgttctggtgctaaacaagttattacttgtcatacacagaagctgttgttggataaaaaggctggtggtattcttaaggatactatgtcttggttttggtttatggttaagtttgtggttgtttgttatcttatttttacagcaggttgtttgtatgtgtatcatacggattattatggtgcaaagatgcacccgatgtatgatataaatgcaacttttcctgttgaaaattttaaggttattgaaaatggtgttcttagagacctagtttctgaggacagttgtttttcaaataagtttttaggttttgatgacttttgggctaaaacctacactaatagtagggattgtccaatagttacagctcttatagatggtactggttttgttgctgcaggtgtccctggtcatgttcactgggttatggacaatactatgtttgtacatacagcacaggctgaagcaaaaccatggtatgcacctagttggttccctcaagatgatgttgtcggctatacaatagactctgttgttacacagggtgaattttatagttcaattgcgacttttccagcacgttgtatgtatttggcaactagtgcaagtccgcaattgtattgttatggtggtgaaaatgatgcacctggtgcaatgtcatatgatagtgtgcaaccgcatcgtgtctattttcaaccaaataatgtaaggttttctattccacaacagattatgtacacaccttatatagttaaattggcttctgacaattattgtagaggtagtgtttgtgaaaagacaaaacttggttattgttattcatggaatcctcgatgggtcctttataatgatgactatgttagtttgcctggtgtttattgtgggtctactattagagaacttgtgttttctatgttaggttcattttttacaggtgttagtcctaatttgtatatacacttgacaactatgtttttggtgttgttgggtgttatgattatcttcgcattggttattaggtttcaaggtgtttttaaagcctatacaccagttgtctttgcagtcattatggtttggggcctaaatgtttttatgttgtgtgtttatagctataacccttttgtggctgttatgctattagcactgtattgttacatgtcactcatggttgggcgtactgtttcaacagttatgcacttgtgggttgtatttacatttataatggttgtgccgtggtggttggcctgtgtttatatagcctttgttgcttatatgtataccccgtttgctatgtggtgttatggtactgctaaacaaactcgtaaactttatgaaggtaatgagtttgttggtaattatgatttagcagctcagagtacatttgttatacgtaatgtagagtttgttaaactttgtaatgaagttggcgacaagcttgacatttatttgtcggcttacgctagactaaagtattattcaggtactggtggtgagcaagattacttgcatgcttgccgggcttggttggcctatgctttggatcaattccgtgctaatggtgttgaagtactttatacaccacctaaattttcaatgggtgttactagattacaagcaggctttaagaagtttgtttcacctagtagtgctgttgaaaaatgtgttgttatggtacgttataaaggtacagtccttaatgggctgtggcttaatgattgtgtgtattgtccacgtcatgttatgggcaagtttagtggagatgaatggcaagatgtgttaagcttggctagtaaccatgaatttgaagttactggaccagacggatcatctttgcaagttgttagtaggaaattgcagggtgctgttttgatacttcaaactgctgtggttaatgttaatactcctaagtataaatttgttcaggcacagtgtggagacactttcacaatagcttgttcatataatggtaatgtggttggcctttatcctgttactatgagagctaatggtactattagagcttcattcgcttgtggctcgtgtggttccgttggttttaatatggacggtggtgttgtagcattttgttatatgcatcacttagaattacctaacgctatacatactggcactgatttggctggtaatttttatggtggttttatagatgaggagtgtgcacaacgtgttgagccagaccctcgtattactaataatgtggttgcatggttttatgccgctattattagtattaaggaaagtagttttagcctgccaaagtgggttgaaagtacacctattagtgttgatgattataataagtgggctgcagatagtggcttcactccttatgttgatagtattgcagttaataaacttgctgctataacgtctgttgatgttggtagggttttgcgtactattattgtaaaaaatacacactggggtacagaccccataatgggtgtttttaattttgatgatgaattgacacctgagtctatttttaatcaaataggcggtgttaagttacaatcttctattattaagcgcacgatttcttggttttggtctagactcgtgttggctatgtttctgtttgttttgtgtgcaatggttttgtttactgttgtgccttataaatattttatatacgctgctattattttgtttgttgctgtttttatagccgcgtttactattaagcatgtgttggcatatttggatactttccttttgcctactctttgtactgttatgataggggtgtgtatggaagttcctttcatatacaacacttatatttatgactttttgaaaggtctttttagtccttggtacaatgttgaggttgttgacactgttgtgccctggatgtttatgccaattatagtgtataccacttttaggtgtatacagggttgttatgctattgactctttttctgcagcgctaacaggtgcctaccaagtagtaaaattgggttttacaatttatacgtcttggaatactgggcatgcttatagtgctggtgactgggatttgttttttgagcttttgcatacgactatgttggccaatattagtagtaattctttggttggcataattgtttttaatgttgctaagtggtgtttgcgttattgcaatctcacttatgtgaactcttatgttttaatggctatatttgttaatgttatgggttggatgtttacttgttattttggagtctattggtggcttaataaagtctttgggctcacttgtggcaagtatacgtataaagttagtgttgagcagtataagtatatgtgtgtacatcgtatccccagtccgaagagtgcttgggatatatttgttactaatatgcttatacaaggtataggtggtgagcgtaaacttcctattgctactgtgcagtcgaaacttactgatgttaagtgtactgctgttgtgttgatgcaattgttgacaaagcttaatgttgaagctaactcaaaaatgcataaacatcttgtagaattgcataataagattcttgcctcagaagatcttgttgagtgtatggataacttacttggtatgttggttaccttgttgtgtgtagattcaactgtggatcttagtgagtattgtgaagatgttttgggtaaagttactgttttacagtctgtggcccaagagttttcacatattccatcttatgctgagtatgagcgtgctaaggatttgtatgagcgcgttttggcagattcgaagagtggcaatgtcacacaacaagaggtggctgcatatagaaaggctgctaatatagcgaagtctgtttttgatagagatctttctgtacaaaagaagttggatgccatggctgagcgtgccatgacaactatgtacaaggaagctcgtgttacggacaggcgtgctaagttggtctcttcacttcatgctttgttgttttctatgcttaagaagatagattctgacaagcttacatctctttttgaacaagcgcgtgatggtgttgtacctctcgcgacagttcctattgtttgtagtaataaactcaccttggtaatacctgatgcaggtacttggacaaagtgtgttgaaggtacatttgttacttattccactgttgtgtggaatattgatactgtctttgacgctgatggcgtggaaattcaacctagttctaatggtcagagtcttgtttaccacattggaggtgacaggattgcatggccacttaaagttaatcttacgcgtaatgttcataataaagtagaggcttctctccaaaacaatgaacttatgcctcaaggtataaaaactaaggcttgtgttgcagggactgatcaagcccactgtaatgttgagtctaagtgttactatactaatattaatggtagctcggttgtagctgccattacttcacataatccaaatttgaaagtggcatcatttttgagtgatgctggtaatcaaatttttgtagaccttgacccaccatgtaagtttggtatgaaggttggtggcaaggttgaagttgtttacctttattttcttaaaaatacaaggtctattattagaggtatggttcttggagccatttccaatgttgttgtattgcaatctaaaggacacgaaactgaagagcttgagtctgttggtatcttgtcactttgtgcttttgctgtggaccctgctgaaacatatttgaaatatgtgtcggcaggaaatcagccacttggaaattgtgttaaaatgttgactgtgcataatggtaatggttttgccataactactaagccaagtccaacaccggaacaagactcctatggtggtgcatctgtgtgtttatattgtagggcacacatagcacaccctggagcttctggtactttggatggtcgttgtccgttcaaaggttcttttgttcaaatacctacttctgaaaaagaccccgttggtttttgtctcagaaataaggtttgtaaagtctgtcagtgttgggttggttttggttgtcagtgtgattttttgcgccagccagttgctaacatgcaaagcacttatgttgctcctgttgttagtactaactctgataagaattatttaaacgggttcggggtagcagtgaggctcgacctgatacccctatctgatggaaaccaacctcatattgtaaaacgagcctttgatgtttgcaataaggagtctgcaggtatgtttcagaatatgaagcataactgtgccaggtttcaagaagtggtagaaggcgaagacagctggaaacacggtcttgaatacaaagactcttattttgttgtgaaacagacgactccctctaattatgtccatgaacaggcgtgttatgaggatttgaagtcggatgttgttgcagttcatgatttctttgtctttaataagactatttataatgttagtaggcagcgtcttactaaatatactatgatggacctttgctatgctttgcgtcattttgaccctaaggattgtgaggttcttaaagaaatacttgtcctcaatgattgcattgaggattggtactggatgcagggtggacaaggccaagccccaggtaattggtttgaccacaaccctacttggtacgacccaattgaaaacccttcatattatgctattttagctaatttaggccacattgtacgtcgtgccttattgaatgctgttaagtttggtgatctcatggtcgaaaaaggctatgtgggtgttgtcactcttgacaaccaggatcttaacggcaagttttatgactttggtgactttcaaaagacaacgcctggtgcaggtgttcctatttttgatagttattattcttatcttatgcctattataaccatgactgacgcactggcaacagagcgtttttatgagttcgataggcacaagggttttaaatcttatgatctccttaagtatgattatactgaggagaagttagaattgttttctaagtactttaagtactgggaccaagagtaccaccctaattgtagcgaatgtgctgacgataggtgtttgatacattgtgctaactttaatatactcttttcaacactcatacctcaaacttcttttggtaatctgtgtagaaaagtgtatgttgatggtgtcccttttatagctacttgtggttatcattctaaagaacttggtgttataatgaatcaagataataccttgtcattttctaagatgggcttgggtcaacttatgaagtttgttggtgacccggcattgcttgtcggaacttctaacaacttggttgacctacgcacctcttgttttagtatctgtgctttagcatctggtataactcaccagacagtcaagccaggacattttaataaagatttctatgactttgcagagaaagcagggatgtttaaagagggatcttctatacctcttaaacacttcttttttccacaaactggtagtgctgctatagacgattatgattactatcgctataacaggcctactatgtttgatatacgtcagctcctgttctgtctagaggtgacttctaaatactttgagtgctatgagggtggttgcatatctgctagtcaggttgttgtaactaacctggataagagtgcaggctatccttttaataaatttggtaaagcccgcctttattatgaaatgagttttgaagaacaagaccagctctttgaatcaacaaagaaaaatgtcttgcctactataactcagatgaatttgaagtatgccatttcagccaagaatagggctcgtactgtggcaggtgtttctattctttctactatgactaatagacagtatcaccagaaggtgcttaagtctatagttaatactagaaatgctcctgtggttattggcacaaccaagttttacggtggttgggacaatatgttgagaaatcttattaaaggtgttgatgacccaattcttatgggttgggattatcctaaatgtgacagagcaatgcctaatttgttgcgtattgcagcatctttggtccttgctcgtaagcacactaattgttgtacttggtctgaccgcgtttataggctttataatgagtgtgcccaagtactttctgagtctgttcttgctacaggtggtatttatgttaaacctggtggcactagcagtggtgatgccacaactgcttatgctaacagtgtttttaacataattcaggctacgtctgccaatgttgcacgtctggttagtaccattacgcgcgacattgtgtatgatgatgttagagctatgcagcacgaactgtatcagcaggtttataggcgtgtcaatcctgacgctgcctttgttgagaagttttattcttatttgaataagcacttttctttgatgattctgtctgacgacggtgttgtttgttataacaacacgtatgccaagcagggtcttgttgcagacatttctgcttttagagaagtcctctattatcagaataatgtttatatggctgattccaaatgttgggttgaacccgaccttgaaaaaggccctcatgaattttgttcacaacacactatgcttgtagacgtggatggcgagcctaaatacttgccatatccagatccttcacgcatcttgggtgcttgtgtttttgttgatgatgttgacaagactgagcctgtggctgttatggagcgttatgtagctcttgccattgatgcttatccgcttgtctatcacgaaaatgaagagtataagaaggttttttatgttcttctttcttatattaggaagctctatcaagaactttctaagaacatgttgactgactattcctttgttcttgatatagacaagggtagtaagttttgggaggaggagttttattctaatatgtatagagctcctaccactttgcagtcctgtggcgtttgtgttgtttgccagagtcaaaccattttgcgctgtgggaattgtgttcgtaaaccatttttgtgctgtaagtgttgttatgaccatgtcatgaacacaaatcacaaaaatgttctttctataaatccttacatctgcacacaccctggttgtggtgaagcagatgtaactaaactctatctcggtggtatgtcctatttttgtgttaatcacaaacctaggctttctatacctttggtttcaaatggtactgtgtttggtatttacagagccaactgtgcaggtagtgagaatgttgatgatttcaaccagcttgccaccactaattggtctactgtagaaccttatattttggcaaatagttgtagtgatactcttaggcgtttcgctgctgaaacggtgaaagccactgaagagttgcacaaacagcaatatgccagtgctgaagtgaaagaagttctttctgataaagagcttattctctcgtgggaaccaaataaggctcgcccaccattgaataggaattatgttttcacaggttttcacttcactagaaatagtaaggtgcagcttggtgattttacttttgaaaaaggtgatggcaaagacgttgtcttttataaagccacatctactgcaaaattgtccgttggcgacatttttgttttaacttcacacaatgtggtatcgcttacagcgcctacattgtgtcctcagcaaactttttctaggtttgttaatttgcaccccaatgtgatggtaccagagtgttttgttaataacataccattgtatcatctagtgggtaaacaaaagcgtactacagtacaggggcctcctggtagtggtaagtctcactttgccataggtcttgctgcttactttagtaacgctcgtgttgtgtttacagcttgttcacatgctgctgttgatgcgctgtgtgaaaaagcttttaaattcttgaagattgatgattgcactcgcatagttccgcagagagctactgtagagtgcttttctaaatttaaacctaatgacacaggcaaaaagtacatttttagtactataaatgccttgccagaggttagttgtgatatcttgttggttgacgagattagtatgttaaccaattatgatttgtcttttgttaatggtaagattaattaccagtatgttgtatacgtgggtgatcctgctcaattgccagccccccgtactcttttgaatggatcactttcacccaaggattataacgttgtcaccaaccttatggtttgtgtcaaaccagatatattccttgcaaagtgttaccgttgtcctaaagaaattgttgatacagtttcttctcttgtttatgatggtaaatttattgctaacaaccctgaatcgcgtcagtgtttcaaggttgtcgtcaataaaggtaattccgatgttggtcatgaaagtggttcagcttataacatgacacaactcgagtttgttaaagattttatttctcgtaataaggagtggaagggtgctacctttatttctccttataatgctatgaaccagagagcgtaccgcatgttgggacttagtgttcagactgtcgattcatctcaaggttcagaatatgattatgttatattttgtgtgacagcagattctgctcatgcactcaatattaacaggtttaatgttgctcttacacgagcaaagattggaatactcgttgtcatgagacaacgggacgaattgtataatgcactccggtttgtagagcttgacagtaatgtcgcactacagtctactggtttgtttaaaatttgcaataaagaatttagtggtgtttcacccgcttatgcagttaccactaaagctctttctgcaacttataaggttaatgatgaactagctgcacttgttaatgttgaagctggctcacagattccttataaacacttgatttcccttttgggtttcaaaatgagtgtcaatgttgagggttgtcacaacatgtttataacacgtgatgcggcaattcgcaatgttagaggttgggttgggttcgatgttgaggccacacatgcttgtggacccaatattggtactaacctaccctttcaagtgggcttttctactggtgctgactttgttgtcacgccagaaggccttattgacacacctactggtaataattttgagccagttaattctaaagctcctcctggtgaacaatttaaccatttgaggacgctatttagaagtgctaagccctggactgtcataagaccaaggattgtgcaaatgcttgcagacaatttgaataatgtttcagattgtgttgtttttgtaacctggtgccacggtttagaacttactactctgcgctattttgttaagataggtgcagaagaagtatgttcttgtggtgctagagctactaccttcaattcttccacgctggcctacgcctgttggaagcattgtttaggttttgattttgtctataatccatttattatagacatacagcaatggggttattctggaaatctccagtctaaccatgatttgtattgtgatgtgcatggacgtgctcatgttgcgtcggctgatgctattatgacgcgttgtcttgcaatcaacaatgctttttgtcaagatgtcaactgggatattacttatcctcatattgctaatgaggatgaagtgaattctagttgtagatttttgcagcgcatgtattttaatgcatgtgttgatgctcttaaagttaaggttgtttatgatataggcaaccctaaaggtattaaatgtgttaggcgtggggatgttacttttaagttctttgataagaacccaatcgtccccaatgtcaaacaattttgttatgattatgaccaacacaaagacaggtttgttgatggtctttgtatgttttggaattgtaatgtggattgttatcctgacaattctcttgtttgtaggtatgacactagaaatcttagtgtctttaacctgcctggttgtaatggtggtagtttgtatgtgaataaacatgccttccacacacctaaatttgatcgcattagcttccgcaatttgaaagctatgccgtttttcttttatgatgcatcgccttgtgacaccgttcaagttgatggtgtagcgcaagaccttgtgtcattgtctactaaagactgtattacaaagtgtaacatcggcggtgctgtttgtaaaaagcatgcacaaatgtacgccgaatttgttacttcttataatgcagctgttactgctggttttactttttgggttactaatcagtttaacccttataatttgtggaaattgttttcttcacttcagtctattgacaacattgcttataatatgtataagcgtggtcattatgatgcagttgttggtgaaataccaacagttgtgactggagataaagtttttgttattgacaagggtgttgagaaggcagtgtttgtgaatcagtctacattgcctacttcagtggcttttgagttgtttgcgaagagaaacattcgcacactacccaataatcgtattttgagtggtcttggtgttgatatagcctataagtttgtcatatgggattataccaaccaaacgccattgtatcgtaacaccgttaatgtgtgtccttatactgacattgaacctaaggggcttgttgttttgtatgatgaccgtaatggtgattatcaatcttttcttgctgctgatgatgctgttcttgtttcaacacagtgttataagcggtatccttatgctgagattccatcacacttgcttgcgcagaatgggctcccacttaaagatggtgcgaacttgtatgtttataagcgtagtaagggtatgtttgttacccttcctgaaacgcttaacacacaagggcgcagttacgaaactttcgaaccacgcagtgatgttgaaagagagtttttgtcattgtctgaacaagactttgttgtaaagtatggtaaagaccttggtcttgaacacatactgtatggtgaagtagacaaaccacaattaggtggtttacacactgttataggtatgtacaggcttttgcgcgacaataagttgtctgccaaatctgtaacagactcagattgtgaagtcatgcaaaactattttgttcttgcagacaatggttcctacaaacaagtttgcactgttgtagacttgttgttggatgactttttagacttacttaggaacatactccaagagtatggttcaggtaagtctaaggtagttacagtacccattgactaccacaacatatcttttatgacgtggtttgaaaatggttctattaaaacatgctatccacagcttcagtcagcttggaagtgtggttataatttgcctgaactttataaagttcagacttgtgttatggaaccttgtaacattccaaactatggtgttggaataatgttgcctgatggtattatgatgaatgtggcgaagtatactcaactttgtcagtatttgtctaaaaccaccatgtgtgtgccgcataatatgcgtgtcatgcattttggtgcaggaagtgacaagggtgttgctccgggaaccactgttcttaaacaatggcttcctgaaggcacacttcttgtagataatgacattgacagttacgtttcagatgcacacgtgtctgtcattgatgattgtaataaatttagaacggaacacaagttcgatcttgtgatatccgatatgtacacagataatgattcaaagaagaaacatgaaggcaaggtggccaataatggaaacactgatgtgttcatgtatcttactaatttccttcgtaacaacttagcgcttggtggcagctttgctgtaaaaataactgagacgagctggtatgaaggtctttatgaaatagcacaagattgttcctggtggactcttttttgtactgcagtaaatgcatcatcatcagaagcattcttggttggtgttaattacttaggtgagagcgaaaaacacaaaataagtggaaggacgcttcacgccaattatatattttggcggaatgttagttatttacaaacatccgcgtttactatatttgacgttgcgaaatttggattaaaaacaaaagcaacgccagttgtaaatttgaaaaaagaattacaaaccgacttagttcttaatttaattaggaacggtaaattggttgttagggatgttggcaacgttggttttgttgacgacagttttgtttgtgcccattaa

SEQ ID NO: 202 - DNA, 3543 bp, Avian coronavirus
  source 1..3543: mol_type = unassigned DNA
ttgttagggatgttggcaacgttggttttgttgacgacagttttgtttgtgcccattaattctctttcaggagacaattgggtttattactacccatcagcttttaggccttctaatggctggcataagcaagaaggtgcctattctgttgttggtattcagtctactaatgtcactggcaattcagcaggttgtccttatatgttcaacactacatctcaacttattgccagtgatgctgttgctattatgtctaaatttcctactacttggacaaacaataacggtcagatttatgttcatatgattggttgtactatggccaatcatactttttatgtatggggccctttgaaaagtggtaactcacgacctggtgttcctaatggcctcttgtttcaagtctactcttccaacttcactcttctttataataagacttggttgggttggaaagaacatactcgttttgaatcacttcagtgtgtttctttatttggtagtgtctattttaatggcgatcttatttatcagctaggttataatgcccaagtacagaatgtgtcatttgtttattgtggcactgtaacagggtattattatttttcaaaacagttccaatcattggtttatttccaaaatggcactgctttggaccttatattgtgtgatgacactccccgtggtattttagcctgtcaatatggaacaggtaattttactgatggattgtacccttttactcattccagtgttgttaataaaactttggaggtgtatctcaccaatagtgttgttaataacactgtgtatggccaacttgttaacgtaactttttataatcagactaatgttcaagttggcaatttaagtggctcgcaactgggtaaccttaatcaattaaggctttatcaagacaaagtttttgatgctccttattataatcttaatttttcttttttggattcgcctgactttgagtttcgaccacaaggtggtggctggacaccagaggcagactcccaatttacacaatgtccttttactattaatagtattaataatggtcattgttttaattctttacgcgtagccattacttacgtccccggttatagagggtgttattatgctatgcgtcactttggagcccagtgttgttatatgtattatatgaacaaccaacctctttgtgctggtatagaccctgttgagtataaccgcacttggcgttgtgcgttagctgtgcttgtttttatgcaatctggttcccgcatttgtacatctgaaacggttccaattaatactgtttctactgttttaaacaacacttttgtcctggacacttgtgttaattatactatttatagtagatatggtgttggtctagttactaatgtcactgaccaagttacaccaggtacctttttaaatgatggtggtcttgttgtgttggattctagtggtgccatagacatctttgctgttaatgaagttgttggtaggcactactttaaagtcaatccttgtagtgatgtgaaccaacagtatgttgtctctggtggcaacatagttgggcgtcttacatctgttaatgaatctggttctcaatttttagacaatcagtattatgttccacttattaatagcactcgttctaaacgttctgttcagaacagtactgttactagttgtgcttatgtttcatacggccagtattgtatcaagcctgatgccagtgttgtacaaatacagcctgatacttttgatggttttgtaacacctcttttaaatgctactgagtatgttctcataccagatagttttaacttgactgttacagatgagtatatccaaactcgcatggagcagattcaaattaactgtattcaatatgtctgcggtagttcagtgcagtgcagacaattgtttcaacagtatggttctgtttgtgacaatattttgtctattgttaatggtctggctcagcaggataatgcagaacttatctctctttattcttctactcaacctggtcagaattacccacccgtattcaataatcttgatacaggtggttttaatatttctttgctcttacctcaaaataagagtggtgtccaatcaaggtcttttatagaagaccttttgtttactaaaatcgaatctgttggactacctactgatgctgagtaccagaagtgtacttcaggtcttttaggttgggttaaagatttggtttgtgcgcaatactataatggtattatggttttgccacctgttataacaaatgaaatgcagtttatgtacactagctcacttgttgcatctatggcgtttggtggtttaacatcagcaggggctattccttttgcaacacaagttcaggctagaattaatcatttgggaattacgcagacactccttcttaagaatcaggagttgcttgctaattcttttaataatgcacttcaatatatgcagcagggttttgaagccacttcccaggctcttcagcagattcaggatgtggtaaatcaacaggctgctgttcttacagaagtaatgagctcacttaataaaaactttggtgccatttcttctgttattcaagacatttacaaacagctagatgagctgtctgctaatgctcaagttgataggcttattacaggccggctttcctccttatctgtcctagcttcatctaaacaagctgagtaccttagagtagctcagcagagacagttggcacaggataaaattaatgagtgtgtacgctcacaatccactaggaattctttctgtggtaatggcatgcatgtcttgtccataccacagtcagctcctaatggaatagcgttcatacactttacatacacaccgcaaacatataaaaatgtcactgcggttgttggtttttgtgttactaccaatggtagtggatatggcttggtgcctgttaatggtagaggcatctttatttatgttgacgatgcatattatatcacgtcacgtgatatgtatatgccccgcaacataacttcaggtgatgtggttgtcttaacgtcttgtcaggccaattatgtcactgtcaataggacagtcgttacaacctttgttgatgatgactttgattttgatgatgagtttgagaagtggtggaatcagactgaccatgtcattccagacctggacgagtttaattacaccattcctattcttgatattaataatgaaattgaccgtatccagcaggcaatacaagggttgaatcaatcctatgtagacctggagtcactgtcaattctcacaacttatattaagtggccttggtatgtgtggttagccatagcctttgccactatcatatttatcctcattttgtgttggattttctttatgactggctgctgtggctgttgctgcggttgttttggtcttatccctctaatgtctaagtgtagaaagaaatcttcttactacaccacatttgatgatgatattgttggtgaacaaatcagacctaaaaagtctgtttaa

SEQ ID NO: 203 - DNA, 306 bp, Avian coronavirus
  source 1..306: mol_type = unassigned DNA
atggcaccaaagaaattctttgtgcgctgttacaagcgaattcgctccttatttcgttcacgaaacagcagctcaagaatagaggactaccttttgggcagttctctgactgttagttgtttcaatgaagtttgcttttgcatgcaaccagaatgttctgtttgcaatgttacttgtgattgttgtggaggttgtggtgactggttgtgtaaaacctgtaattacattccacttaataattttgatgctgatgcttatatcttaaagcaccagcagtcaatgattaacttagttctgcaattgtaa

SEQ ID NO: 204 - DNA, 306 bp, Avian coronavirus
  source 1..306: mol_type = unassigned DNA
atgcttgccataattgaaaacggttttaaaaccgtttgtttggcaggtgtagtttttgtcacaattgatgctttactatccacttctttaagtggtttacaatttcaacacgtcatgctagagagaggtgaagatgcaatgtgtgatgcaagtcgcatagcgcacctcatctcattactagctgactgtcgtgtttatgatccttttgctgaagcattttattgtaacggcagcttttgggaagtagattctatggaagaggacggaagcattttgacttcagactcggacatagatttgtattag

SEQ ID NO: 205 - DNA, 303 bp, Avian coronavirus
  source 1..303: mol_type = unassigned DNA
atggacatactcagtaaatctgttgaagacaatggtgccttcctcactgctgtttatgtctttgttggttttattgctctctacttattaggtagagctttacaagcattcactcaagcagcagatgcatgtttcttgttttggtacacctggtttgcacttccaacagggcgtggcatagcctttgtgtaccgaaatacatatggtagaaaaattaacaatccggaattagaagcggttattgttaatcagtttccaaagaacggtcctaataacaagttgcctgcaaatttcgcatcatga

SEQ ID NO: 206 - DNA, 681 bp, Avian coronavirus
  source 1..681: mol_type = unassigned DNA
atgagtaatgatagtgcgaattgcacacttggttatgaagaggcggtttgggtttttaaagagtataacctctttctcactgcctttttgctttttatgtccatgattctgcagtatggctatgccacacgtagcagattcatgtatgtcataaaaatgatagtgctgtggctgttttggcctctgaacattgctgtgggtgttatatcctgtatatatcctgtaggaactggcggtcttgtagcagctattgtcctgacaatttttgcatgcctgtcatttgttggttattgggtccagagtattagactctttaagcgctgtaaatctttttgggcttttaaccctgagagtgatgcagtgggatccatttccctaacaactggccaaacatgtactttctctatagagagtgtccctatggtactctcacccattattaaggctggagtgctgtattgtgagggtcaatggcttgctaagtgcacaccctcggaagtgccgcagcacatttacgtttgcacacctgatagacgtaacgtctacaaaagagtagcagcgtactcaggtgataacaaagcaaacaaaaaatcatttgctacttttgtcttcactaaggagtctgttgactcaggtgatctggacagtgtggcaacatctggtggtagcctctactcttaa

SEQ ID NO: 207 - DNA, 198 bp, Avian coronavirus
  source 1..198: mol_type = unassigned DNA
atgagtttttgctctaggtttactaaggcgactatctctttttataaatcactcctactctttgaacttagagttttggataaatttattttaaattacggacccacttgcttccttcttagttgcaagaggttcctattgtttcaagttaatattttgtatagattggtatttacaccaaaaaattcgctggtatga

SEQ ID NO: 208 - DNA, 270 bp, Avian coronavirus
  source 1..270: mol_type = unassigned DNA
atgaacaaccctttttccactgcgacagcacgtaaagcgcgtgtttttattagaggtggattaaatagtgtgtttttccttaacgaaaagggacaaccagaagtttgtcctttttgcactgccttagtagcccgtgggcaactttgtcaggagcatttgtttaataacaacattttatcatggcatcgcgtgacgcgtctaagtcaaaaaataagaccgatgcgccagcaccagtgctcaagttgggaggtccagcaccacctaaaatag

SEQ ID NO: 209 - DNA, 1257 bp, Avian coronavirus
  source 1..1257: mol_type = unassigned DNA
atggcatcgcgtgacgcgtctaagtcaaaaaataagaccgatgcgccagcaccagtgctcaagttgggaggtccagcaccacctaaaataggttcttctggcaccgcatcatggtttcagccaataaaggagaagaagatgactcacaatcctcccacctttactggaagtggtgttccagagaatgacaatgtcaagaaaccagcgcgtcatggttactggaagcgccaacgcaggtacaaacctggtaaaggcaagagaactccagtcactgatgcctggtatttctattacactggcacaggcccgtttgctgaccttaaatggggtcagcctcatgacgatattgtctgggttgctgttgacggtgctgatgttgatgcaaaatctggtcaaggaactagagaccctgataagttcgaccaattccctcttcgctttgctgaaggtggtcctgacgataatttccgctgggactttatacctgtaggcgggcgcggtaggagtgggagatcttcagttgcaacatccagagagtctagtagacctgggtctcgcgaaggttcaagagggcgcaggcagatgggtcctaatgaggatctaattgctcgtgctgcaaggattattgaggagcagcagaagcgtggcggtcgcatcactaaggctaaggctaatgagatggcggaacgtcgctactgcaaaagaactcttgctcctggaaagactgtagaccaggtttttggtacacgtcagaagggccgtgagcgcaacttcggtgatgatagaatggtagaggaaggcattagggatgggcgtactacagcaatgctcaacctgattccgtcttcgcatgcaatgctctttggcagtcatgtccaggcaaaattgcagccagaagggctcctcgtcactttcagttttacaactgtagtgccgcgtgatgaccctcagtttgaaaattatagacaaatttgtgatgagtgtgttgacggtgttggaacacgtcctaagaatgaacccaaacccagatcacgctcttcttcaaaacctgcttctcgtgcggcttccccggcgccaaaacaacagcgccctaagaaggagaagaagccgaagaatcaggataaagataaaactgatggtgcaatgtctcaagaagagaaggcagtgaatgatcagctggaatttgatgatgcagaccaaggtatgcctgataaaatagattggggatcctctgctcttggtgatactgagatttag

SEQ ID NO: 210-250 - skipped (41 entries)

SEQ ID NO: 251 - protein, 6672 aa, Avian coronavirus
MAPGLSKGVSPNKKNVIFVLKDIQPALCDALFFYTSHTPRDFADAHAVRERFDRNLQSGRVFKFETVCGPVYLQGVPSVPPGVKALGSESKLADLESLFGVSPLSRRYRDLLKTAPQWSLNVESLDAQAEKLDTLFNSSEILWLQVAAKVQVSAMALRLMANDVVNLVIEALGQEFASMFAIVRKQVRAVLDKCLMVFENVKELPQRIAALKAAFAACVKRMTVVVVDKCLMIREFAGTCLASVNATMAAWCRELPTGFMGSKVFDKLAFFKEAVVKTVKNVAHAPDGVTGYSVIGNARGTQVVIRGMRNDLTLLEQRADVSVEKEGWSAVFDGRLTYVFKSGECYYAAPLAGNFVLNDVYCCERVVLLSDGYTPEINDGLLLAALYTSSNVADVLAALKKGEPFKFLGHSFVYVKDAAVSFTLAKGASIADVFKLFVKEAVDVWSVFNEKSHEFWTKAHNKCRNLKDLVATHCCKAQVTFVVLAIALGVTVWEIVKQVLFKVAGLFTAVVDFCSKAWNGFCDQLIHAKLFVNELGCVLVGVKNHCFQLLLIAVHAFYKTLEKCAIGRIWNGDLLFWAGGAHKVSEDNGEVWFDAVDTMQVDEQGTVVEDNVPDFVVCHDVSIPERQKGYIVQIAADGKNYMFFRYEQGVNTYYAPMSQVGAVNVVCRAGGKTVTFGDDQVKELPPPDVKCIYIDIECCGEPWTSVFKRVYKDPVEVETSLTVEELRAVVYEMMCDSLKLFPGAPQPPPYDNVALVDNQGRDLQNIDSCHLVYVDYDSDGAVSDEEEEDVSDTEDVNEEDERLACLLKNSANFKYPLPYDDEYSVFCGRLVHKDAIDTLHYPSGDDMYVINNAFEGAVKALPQSVVDVLGDWGVAVDNQERAMNKEIPVEIPKEETQKPQKVEEQKPRETLVEISKEETQKPQKVEEQKPKETLVEIPKEETQKPQKVEEQKPKETPVEIPKEETQKPQKVEEQKPRETPVETPKEETQKPQKVEEQKPKETLLNKQFFSDSSSDEEPKKKLFRFKLKPTKCKVPSNVEYSTCVGDLSVVVAKAMDSFEDFVLVNAANEHMCHAGGVAKAIADFCGNKFVDYCDTFVGKNGPQQQLLAPSGVARMQAVNNVVGPRHGQPDLFDKLVAAYKKVVVVGAVNYVVPVLSAGIFGVDYKMSIDAMRKAFCDMKIRVLLFSLNQEHIDYFNATCKQKTVYLTEDGTSFKTLVLRPGDTLGHLGGVFARNKTVFTADDVSDKEVLFLPTTDKNVLEHYDLDAQKYVLFLTTLSQKWEVFFKGGVLQLVWRDGNCWVNAVITLLQAAKIKFKGYLATAWAQLLGGDPTEFVAWCYASTNTKVGDFGDSNVLLLTLAHHFSVDYTKALIVRRVVCKCGVNTQQVYGINACVQHVCATNMLNFMKQYGDCSVCGEKYVDEVVNINVPYLMLLAGGGPQNVDRDETVVANIVFVGTIDSGHCYTQTANNVFDNLVQNRQFSKRAPYITAFYPQFSLKSKNSLSVAKKSKSKSDVVKEDVSNLATGSDVEVEDISNFERWYSDNYYDCLTVQEDSSLPVDNTNFDFVVDSKLPLTLTVRGVSRDVNFKSAEGFTYILTPERGQTCNSPVYYSSLDLVSLRAIWVNGDSNYVVGNPNYYSRLLRIPTLYENAEKFVNIGERVGNVTYGVWRAKSLNKPQLSTVMASVKAIIGVANPVSNVVGNTVKKVVAVSDGLGDGVFGNMWGGVCGLIGGTCKFVYDKVSLHFIRTMLLFLFYFCKAGFKKFSSNYRSVITKVVMTALLLCWFVYTYEAIHFVGIRILDFLFEGSFCGNYTGYGKDSFDMLRYCGDDAVCRVCLHSVDSLHLYKHAYSVEQVYKDAVAEFKFTWNWLYLVFLVLFVKPVALFVIVCYCLKYLVLGAEVLQTGITIVDWCVATFFSHFNFMGASFYVWILWKVYTYVHHIMYCKDITCDICRRVARNSRHEVSVIVNGRKQSVYVYTNSGFTFCKKHNWYCKGCDTFGHQNTFISPEVAGELSDKLKRHVKPTSSAYFLVDTAQLVGDFVNLNYSSKAPGLESTKQQVKCFTVSDFLKNAVFLKDAVKCERMANDSFIVCNTQSLHDLEAAKNAAVYYAHYLCKPILILDQVLYDTLACEPVSKSLVDKVCGVLANIVEVDFANLNYKAGSLRDALLSVTSDEEAVDMAIFCHNYDLNYTSDGFTNVVPSYGFDLGKLSPRDKGFLINADACIANLKVRNAPAVVWNYYDLIKLSDNCLKFLVSGVIKSGAKFYVTRSGAKQVITCHTQKLLLDKKAGGILKDTMSWFWFMVKFVVVCYLIFTAGCLYVYHTDYYGAKMHPMYDINATFPVENFKVIENGVLRDLVSEDSCFSNKFLGFDDFWAKTYTNSRDCPIVTALIDGTGFVAAGVPGHVHWVMDNTMFVHTAQAEAKPWYAPSWFPQDDVVGYTIDSVVTQGEFYSSIATFPARCMYLATSASPQLYCYGGENDAPGAMSYDSVQPHRVYFQPNNVRFSIPQQIMYTPYIVKLASDNYCRGSVCEKTKLGYCYSWNPRWVLYNDDYVSLPGVYCGSTIRELVFSMLGSFFTGVSPNLYIHLTTMFLVLLGVMIIFALVIRFQGVFKAYTPVVFAVIMVWGLNVFMLCVYSYNPFVAVMLLALYCYMSLMVGRTVSTVMHLWVVFTFIMVVPWWLACVYIAFVAYMYTPFAMWCYGTAKQTRKLYEGNEFVGNYDLAAQSTFVIRNVEFVKLCNEVGDKLDIYLSAYARLKYYSGTGGEQDYLHACRAWLAYALDQFRANGVEVLYTPPKFSMGVTRLQAGFKKFVSPSSAVEKCVVMVRYKGTVLNGLWLNDCVYCPRHVMGKFSGDEWQDVLSLASNHEFEVTGPDGSSLQVVSRKLQGAVLILQTAVVNVNTPKYKFVQAQCGDTFTIACSYNGNVVGLYPVTMRANGTIRASFACGSCGSVGFNMDGGVVAFCYMHHLELPNAIHTGTDLAGNFYGGFIDEECAQRVEPDPRITNNVVAWFYAAIISIKESSFSLPKWVESTPISVDDYNKWAADSGFTPYVDSIAVNKLAAITSVDVGRVLRTIIVKNTHWGTDPIMGVFNFDDELTPESIFNQIGGVKLQSSIIKRTISWFWSRLVLAMFLFVLCAMVLFTVVPYKYFIYAAIILFVAVFIAAFTIKHVLAYLDTFLLPTLCTVMIGVCMEVPFIYNTYIYDFLKGLFSPWYNVEVVDTVVPWMFMPIIVYTTFRCIQGCYAIDSFSAALTGAYQVVKLGFTIYTSWNTGHAYSAGDWDLFFELLHTTMLANISSNSLVGIIVFNVAKWCLRYCNLTYVNSYVLMAIFVNVMGWMFTCYFGVYWWLNKVFGLTCGKYTYKVSVEQYKYMCVHRIPSPKSAWDIFVTNMLIQGIGGERKLPIATVQSKLTDVKCTAVVLMQLLTKLNVEANSKMHKHLVELHNKILASEDLVECMDNLLGMLVTLLCVDSTVDLSEYCEDVLGKVTVLQSVAQEFSHIPSYAEYERAKDLYERVLADSKSGNVTQQEVAAYRKAANIAKSVFDRDLSVQKKLDAMAERAMTTMYKEARVTDRRAKLVSSLHALLFSMLKKIDSDKLTSLFEQARDGVVPLATVPIVCSNKLTLVIPDAGTWTKCVEGTFVTYSTVVWNIDTVFDADGVEIQPSSNGQSLVYHIGGDRIAWPLKVNLTRNVHNKVEASLQNNELMPQGIKTKACVAGTDQAHCNVESKCYYTNINGSSVVAAITSHNPNLKVASFLSDAGNQIFVDLDPPCKFGMKVGGKVEVVYLYFLKNTRSIIRGMVLGAISNVVVLQSKGHETEELESVGILSLCAFAVDPAETYLKYVSAGNQPLGNCVKMLTVHNGNGFAITTKPSPTPEQDSYGGASVCLYCRAHIAHPGASGTLDGRCPFKGSFVQIPTSEKDPVGFCLRNKVCKVCQCWVGFGCQCDFLRQPVANMQSTYVAPVVSTNSDKNYLNGFGVAVRLDLIPLSDGNQPHIVKRAFDVCNKESAGMFQNMKHNCARFQEVVEGEDSWKHGLEYKDSYFVVKQTTPSNYVHEQACYEDLKSDVVAVHDFFVFNKTIYNVSRQRLTKYTMMDLCYALRHFDPKDCEVLKEILVLNDCIEDWYWMQGGQGQAPGNWFDHNPTWYDPIENPSYYAILANLGHIVRRALLNAVKFGDLMVEKGYVGVVTLDNQDLNGKFYDFGDFQKTTPGAGVPIFDSYYSYLMPIITMTDALATERFYEFDRHKGFKSYDLLKYDYTEEKLELFSKYFKYWDQEYHPNCSECADDRCLIHCANFNILFSTLIPQTSFGNLCRKVYVDGVPFIATCGYHSKELGVIMNQDNTLSFSKMGLGQLMKFVGDPALLVGTSNNLVDLRTSCFSICALASGITHQTVKPGHFNKDFYDFAEKAGMFKEGSSIPLKHFFFPQTGSAAIDDYDYYRYNRPTMFDIRQLLFCLEVTSKYFECYEGGCISASQVVVTNLDKSAGYPFNKFGKARLYYEMSFEEQDQLFESTKKNVLPTITQMNLKYAISAKNRARTVAGVSILSTMTNRQYHQKVLKSIVNTRNAPVVIGTTKFYGGWDNMLRNLIKGVDDPILMGWDYPKCDRAMPNLLRIAASLVLARKHTNCCTWSDRVYRLYNECAQVLSESVLATGGIYVKPGGTSSGDATTAYANSVFNIIQATSANVARLVSTITRDIVYDDVRAMQHELYQQVYRRVNPDAAFVEKFYSYLNKHFSLMILSDDGVVCYNNTYAKQGLVADISAFREVLYYQNNVYMADSKCWVEPDLEKGPHEFCSQHTMLVDVDGEPKYLPYPDPSRILGACVFVDDVDKTEPVAVMERYVALAIDAYPLVYHENEEYKKVFYVLLSYIRKLYQELSKNMLTDYSFVLDIDKGSKFWEEEFYSNMYRAPTTLQSCGVCVVCQSQTILRCGNCVRKPFLCCKCCYDHVMNTNHKNVLSINPYICTHPGCGEADVTKLYLGGMSYFCVNHKPRLSIPLVSNGTVFGIYRANCAGSENVDDFNQLATTNWSTVEPYILANSCSDTLRRFAAETVKATEELHKQQYASAEVKEVLSDKELILSWEPNKARPPLNRNYVFTGFHFTRNSKVQLGDFTFEKGDGKDVVFYKATSTAKLSVGDIFVLTSHNVVSLTAPTLCPQQTFSRFVNLHPNVMVPECFVNNIPLYHLVGKQKRTTVQGPPGSGKSHFAIGLAAYFSNARVVFTACSHAAVDALCEKAFKFLKIDDCTRIVPQRATVECFSKFKPNDTGKKYIFSTINALPEVSCDILLVDEISMLTNYDLSFVNGKINYQYVVYVGDPAQLPAPRTLLNGSLSPKDYNVVTNLMVCVKPDIFLAKCYRCPKEIVDTVSSLVYDGKFIANNPESRQCFKVVVNKGNSDVGHESGSAYNMTQLEFVKDFISRNKEWKGATFISPYNAMNQRAYRMLGLSVQTVDSSQGSEYDYVIFCVTADSAHALNINRFNVALTRAKIGILVVMRQRDELYNALRFVELDSNVALQSTGLFKICNKEFSGVSPAYAVTTKALSATYKVNDELAALVNVEAGSQIPYKHLISLLGFKMSVNVEGCHNMFITRDAAIRNVRGWVGFDVEATHACGPNIGTNLPFQVGFSTGADFVVTPEGLIDTPTGNNFEPVNSKAPPGEQFNHLRTLFRSAKPWTVIRPRIVQMLADNLNNVSDCVVFVTWCHGLELTTLRYFVKIGAEEVCSCGARATTFNSSTLAYACWKHCLGFDFVYNPFIIDIQQWGYSGNLQSNHDLYCDVHGRAHVASADAIMTRCLAINNAFCQDVNWDITYPHIANEDEVNSSCRFLQRMYFNACVDALKVKVVYDIGNPKGIKCVRRGDVTFKFFDKNPIVPNVKQFCYDYDQHKDRFVDGLCMFWNCNVDCYPDNSLVCRYDTRNLSVFNLPGCNGGSLYVNKHAFHTPKFDRISFRNLKAMPFFFYDASPCDTVQVDGVAQDLVSLSTKDCITKCNIGGAVCKKHAQMYAEFVTSYNAAVTAGFTFWVTNQFNPYNLWKLFSSLQSIDNIAYNMYKRGHYDAVVGEIPTVVTGDKVFVIDKGVEKAVFVNQSTLPTSVAFELFAKRNIRTLPNNRILSGLGVDIAYKFVIWDYTNQTPLYRNTVNVCPYTDIEPKGLVVLYDDRNGDYQSFLAADDAVLVSTQCYKRYPYAEIPSHLLAQNGLPLKDGANLYVYKRSKGMFVTLPETLNTQGRSYETFEPRSDVEREFLSLSEQDFVVKYGKDLGLEHILYGEVDKPQLGGLHTVIGMYRLLRDNKLSAKSVTDSDCEVMQNYFVLADNGSYKQVCTVVDLLLDDFLDLLRNILQEYGSGKSKVVTVPIDYHNISFMTWFENGSIKTCYPQLQSAWKCGYNLPELYKVQTCVMEPCNIPNYGVGIMLPDGIMMNVAKYTQLCQYLSKTTMCVPHNMRVMHFGAGSDKGVAPGTTVLKQWLPEGTLLVDNDIDSYVSDAHVSVIDDCNKFRTEHKFDLVISDMYTDNDSKKKHEGKVANNGNTDVFMYLTNFLRNNLALGGSFAVKITETSWYEGLYEIAQDCSWWTLFCTAVNASSSEAFLVGVNYLGESEKHKISGRTLHANYIFWRNVSYLQTSAFTIFDVAKFGLKTKATPVVNLKKELQTDLVLNLIRNGKLVVRDVGNVGFVDDSFVCAH

SEQ ID NO: 252 - protein, 1180 aa, Avian coronavirus
MLGMLATLVLLTTVLFVPINSLSGDNWVYYYPSAFRPSNGWHKQEGAYSVVGIQSTNVTGNSAGCPYMFNTTSQLIASDAVAIMSKFPTTWTNNNGQIYVHMIGCTMANHTFYVWGPLKSGNSRPGVPNGLLFQVYSSNFTLLYNKTWLGWKEHTRFESLQCVSLFGSVYFNGDLIYQLGYNAQVQNVSFVYCGTVTGYYYFSKQFQSLVYFQNGTALDLILCDDTPRGILACQYGTGNFTDGLYPFTHSSVVNKTLEVYLTNSVVNNTVYGQLVNVTFYNQTNVQVGNLSGSQLGNLNQLRLYQDKVFDAPYYNLNFSFLDSPDFEFRPQGGGWTPEADSQFTQCPFTINSINNGHCFNSLRVAITYVPGYRGCYYAMRHFGAQCCYMYYMNNQPLCAGIDPVEYNRTWRCALAVLVFMQSGSRICTSETVPINTVSTVLNNTFVLDTCVNYTIYSRYGVGLVTNVTDQVTPGTFLNDGGLVVLDSSGAIDIFAVNEVVGRHYFKVNPCSDVNQQYVVSGGNIVGRLTSVNESGSQFLDNQYYVPLINSTRSKRSVQNSTVTSCAYVSYGQYCIKPDASVVQIQPDTFDGFVTPLLNATEYVLIPDSFNLTVTDEYIQTRMEQIQINCIQYVCGSSVQCRQLFQQYGSVCDNILSIVNGLAQQDNAELISLYSSTQPGQNYPPVFNNLDTGGFNISLLLPQNKSGVQSRSFIEDLLFTKIESVGLPTDAEYQKCTSGLLGWVKDLVCAQYYNGIMVLPPVITNEMQFMYTSSLVASMAFGGLTSAGAIPFATQVQARINHLGITQTLLLKNQELLANSFNNALQYMQQGFEATSQALQQIQDVVNQQAAVLTEVMSSLNKNFGAISSVIQDIYKQLDELSANAQVDRLITGRLSSLSVLASSKQAEYLRVAQQRQLAQDKINECVRSQSTRNSFCGNGMHVLSIPQSAPNGIAFIHFTYTPQTYKNVTAVVGFCVTTNGSGYGLVPVNGRGIFIYVDDAYYITSRDMYMPRNITSGDVVVLTSCQANYVTVNRTVVTTFVDDDFDFDDEFEKWWNQTDHVIPDLDEFNYTIPILDINNEIDRIQQAIQGLNQSYVDLESLSILTTYIKWPWYVWLAIAFATIIFILILCWIFFMTGCCGCCCGCFGLIPLMSKCRKKSSYYTTFDDDIVGEQIRPKKSV

SEQ ID NO: 253 - protein, 101 aa, Avian coronavirus
MAPKKFFVRCYKRIRSLFRSRNSSSRIEDYLLGSSLTVSCFNEVCFCMQPECSVCNVTCDCCGGCGDWLCKTCNYIPLNNFDADAYILKHQQSMINLVLQL

SEQ ID NO: 254 - protein, 101 aa, Avian coronavirus
MLAIIENGFKTVCLAGVVFVTIDALLSTSLSGLQFQHVMLERGEDAMCDASRIAHLISLLADCRVYDPFAEAFYCNGSFWEVDSMEEDGSILTSDSDIDLY

SEQ ID NO: 255 - protein, 100 aa, Avian coronavirus
MDILSKSVEDNGAFLTAVYVFVGFIALYLLGRALQAFTQAADACFLFWYTWFALPTGRGIAFVYRNTYGRKINNPELEAVIVNQFPKNGPNNKLPANFAS

SEQ ID NO: 256 - protein, 226 aa, Avian coronavirus
MSNDSANCTLGYEEAVWVFKEYNLFLTAFLLFMSMILQYGYATRSRFMYVIKMIVLWLFWPLNIAVGVISCIYPVGTGGLVAAIVLTIFACLSFVGYWVQSIRLFKRCKSFWAFNPESDAVGSISLTTGQTCTFSIESVPMVLSPIIKAGVLYCEGQWLAKCTPSEVPQHIYVCTPDRRNVYKRVAAYSGDNKANKKSFATFVFTKESVDSGDLDSVATSGGSLYS

SEQ ID NO: 257 - protein, 65 aa, Avian coronavirus
MSFCSRFTKATISFYKSLLLFELRVLDKFILNYGPTCFLLSCKRFLLFQVNILYRLVFTPKNSLV

SEQ ID NO: 258 - protein, 89 aa, Avian coronavirus
MNNPFSTATARKARVFIRGGLNSVFFLNEKGQPEVCPFCTALVARGQLCQEHLFNNNILSWHRVTRLSQKIRPMRQHQCSSWEVQHHLK

SEQ ID NO: 259 - protein, 418 aa, Avian coronavirus
MASRDASKSKNKTDAPAPVLKLGGPAPPKIGSSGTASWFQPIKEKKMTHNPPTFTGSGVPENDNVKKPARHGYWKRQRRYKPGKGKRTPVTDAWYFYYTGTGPFADLKWGQPHDDIVWVAVDGADVDAKSGQGTRDPDKFDQFPLRFAEGGPDDNFRWDFIPVGGRGRSGRSSVATSRESSRPGSREGSRGRRQMGPNEDLIARAARIIEEQQKRGGRITKAKANEMAERRYCKRTLAPGKTVDQVFGTRQKGRERNFGDDRMVEEGIRDGRTTAMLNLIPSSHAMLFGSHVQAKLQPEGLLVTFSFTTVVPRDDPQFENYRQICDECVDGVGTRPKNEPKPRSRSSSKPASRAASPAPKQQRPKKEKKPKNQDKDKTDGAMSQEEKAVNDQLEFDDADQGMPDKIDWGSSALGDTEI

SEQ ID NO: 260 - protein, 7096 aa, Severe acute respiratory syndrome coronavirus 2
  VARIANT 6969: note = MOD_RES - Any amino acid
  VARIANT 6970: note = MOD_RES - Any amino acid
  VARIANT 6971: note = MOD_RES - Any amino acid
  VARIANT 6972: note = MOD_RES - Any amino acid
  VARIANT 6980: note = MOD_RES - Any amino acid
  VARIANT 6984: note = MOD_RES - Any amino acid
  VARIANT 6985: note = MOD_RES - Any amino acid
  VARIANT 6986: note = MOD_RES - Any amino acid
  VARIANT 6987: note = MOD_RES - Any amino acid
  VARIANT 6988: note = MOD_RES - Any amino acid
  VARIANT 6989: note = MOD_RES - Any amino acid
  VARIANT 6990: note = MOD_RES - Any amino acid
  VARIANT 6991: note = MOD_RES - Any amino acid
  VARIANT 6992: note = MOD_RES - Any amino acid
  VARIANT 6993: note = MOD_RES - Any amino acid
  VARIANT 6994: note = MOD_RES - Any amino acid
  VARIANT 6995: note = MOD_RES - Any amino acid
  VARIANT 7002: note = MOD_RES - Any amino acid
  VARIANT 7003: note = MOD_RES - Any amino acid
  VARIANT 7004: note = MOD_RES - Any amino acid
  VARIANT 7005: note = MOD_RES - Any amino acid
  VARIANT 7006: note = MOD_RES - Any amino acid
  VARIANT 7008: note = MOD_RES - Any amino acid
  VARIANT 7009: note = MOD_RES - Any amino acid
  VARIANT 7010: note = MOD_RES - Any amino acid
  VARIANT 7018: note = MOD_RES - Any amino acid
  VARIANT 7019: note = MOD_RES - Any amino acid
  VARIANT 7020: note = MOD_RES - Any amino acid
  VARIANT 7021: note = MOD_RES - Any amino acid
  VARIANT 7022: note = MOD_RES - Any amino acid
  VARIANT 7023: note = MOD_RES - Any amino acid
  VARIANT 7024: note = MOD_RES - Any amino acid
  VARIANT 7025: note = MOD_RES - Any amino acid
  VARIANT 7026: note = MOD_RES - Any amino acid
  VARIANT 7027: note = MOD_RES - Any amino acid
  VARIANT 7028: note = MOD_RES - Any amino acid
  VARIANT 7029: note = MOD_RES - Any amino acid
  VARIANT 7030: note = MOD_RES - Any amino acid
  VARIANT 7031: note = MOD_RES - Any amino acid
MESLVPGFNEKTHVQLSLPVLQVRDVLVRGFGDSVEEVLSEARQHLKDGTCGLVEVEKGVLPQLEQPYVFIKRSDARTAPHGHVMVELVAELEGIQYGRSGETLGVLVPHVGEIPVAYRKVLLRKNGNKGAGGHSYGADLKSFDLGDELGTDPYEDFQENWNTKHSSGVTRELMRELNGGAYTRYVDNNFCGPDGYPLECIKDLLARAGKASCTLSEQLDFIDTKRGVYCCREHEHEIAWYTERSEKSYELQTPFEIKLAKKFDIFNGECPNFVFPLNSIIKTIQPRVEKKKLDGFMGRIRSVYPVASPNECNQMCLSTLMKCDHCGETSWQTGDFVKATCEFCGTENLTKEGATTCGYLTQNAVVKIYCPACHNSEVGPEHSLAEYHNESGLKTILRKGGRTIAFGGCVFSYVGCHNKCAYWVPRASANIGCNHTGVVGEGSEGLNDNLLEILQKEKVNINIVGDFKLNEEIAIILASFSASTSAFVETVKGLDYKAFKQIVESCGNFKVTKGKAKKGAWNIGEQKSILSPLYAFASEAARVVRSIFSRTLETAQNSVRVLQKAAITILDGISQYSLRLIDAMMFTSDLATNNLVVMAYITGGVVQLTSQWLTNIFGTVYEKLKPVLDWLEEKFKEGVEFLRDGWEIVKFISTCACEIVGGQIVTCAKEIKESVQTFFKLVNKFLALCADSIIIGGAKLKALNLGETFVTHSKGLYRKCVKSREETGLLMPLKAPKEIIFLEGETLPTEVLTEEVVLKTGDLQPLEQPTSEAVEAPLVGTPVCINGLMLLEIKDTEKYCALAPNMMVTNNTFTLKGGAPTKVTFGDDTVIEVQGYKSVNITFELDERIDKVLNEKCSAYTVELGTEVNEFACVVADAVIKTLQPVSELLTPLGIDLDEWSMATYYLFDESGEFKLASHMYCSFYPPDEDEEEGDCEEEEFEPSTQYEYGTEDDYQGKPLEFGATSAALQPEEEQEEDWLDDDSQQTVGQQDGSEDNQTTTIQTIVEVQPQLEMELTPVVQTIEVNSFSGYLKLTDNVYIKNADIVEEAKKVKPTVVVNAANVYLKHGGGVAGALNKATNNAMQVESDDYIATNGPLKVGGSCVLSGHNLAKHCLHVVGPNVNKGEDIQLLKSAYENFNQHEVLLAPLLSAGIFGADPIHSLRVCVDTVRTNVYLAVFDKNLYDKLVSSFLEMKSEKQVEQKIAEIPKEEVKPFITESKPSVEQRKQDDKKIKACVEEVTTTLEETKFLTENLLLYIDINGNLHPDSATLVSDIDITFLKKDAPYIVGDVVQEGVLTAVVIPTKKAGGTTEMLAKALRKVPTDNYITTYPGQGLNGYTVEEAKTVLKKCKSAFYILPSIISNEKQEILGTVSWNLREMLAHAEETRKLMPVCVETKAIVSTIQRKYKGIKIQEGVVDYGARFYFYTSKTTVASLINTLNDLNETLVTMPLGYVTHGLNLEEAARYMRSLKVPATVSVSSPDAVTAYNGYLTSSSKTPEEHFIETISLAGSYKDWSYSGQSTQLGIEFLKRGDKSVYYTSNPTTFHLDGEVITFDNLKTLLSLREVRTIKVFTTVDNINLHTQVVDMSMTYGQQFGPTYLDGADVTKIKPHNSHEGKTFYVLPNDDTLRVEAFEYYHTTDPSFLGRYMSALNHTKKWKYPQVNGLTSIKWADNNCYLATALLTLQQIELKFNPPALQDAYYRARAGEAANFCALILAYCNKTVGELGDVRETMSYLFQHANLDSCKRVLNVVCKTCGQQQTTLKGVEAVMYMGTLSYEQFKKGVQIPCTCGKQATKYLVQQESPFVMMSAPPAQYELKHGTFTCASEYAGNYQCGHYKHITSKETLYCIDGALLTKSSEYKGPITDVFYKENSYTTTIKPVTYKLDGVVCTEIDPKLDNYYKKDNSYFTEQPIDLVPNQPYPNASFDNFKFVCDNIKFADDLNQLTGYKKPASRELKVTFFPDLNGDVVAIDYKHYTPSFKKGAKLLHKPIVWHVNNATNKATYKPNTWCIRCLWSTKPVETSNSFDVLKSEDAQGMDNLACEDLKPVSEEVVENPTIQKDVLECNVKTTEVVGDIILKPANNSLKITEEVGHTDLMAAYVDNSSLTIKKPNELSRVLGLKTLATHGLAAVNSVPWDTIANYAKPFLNKVVSTTTNIVTRCLNRVCTNYMPYFFTLLLQLCTFTRSTNSRIKASMPTTIAKNTVKSVGKFCLEASFNYLKSPNFSKLINIIIWFLLLSVCLGSLIYSTAALGVLMSNLGMPSYCTGYREGYLNSTNVTIATYCTGSIPCSVCLSGLDSLDTYPSLETIQITISSFKWDLTAFGLVAEWFLAYILFTRFFYVLGLAAIMQLFFSYFAVHFISNSWLMWLIINLVQMAPISAMVRMYIFFASFYYVWKSYVHVVDGCNSSTCMMCYKRNRATRVECTTIVNGVRRSFYVYANGGKGFCKLHNWNCVNCDTFCAGSTFISDEVARDLSLQFKRPINPTDQSSYIVDSVTVKNGSIHLYFDKAGQKTYERHSLSHFVNLDNLRANNTKGSLPINVIVFDGKSKCEESSAKSASVYYSQLMCQPILLLDQALVSDVGDSAEVAVKMFDAYVNTFSSTFNVPMEKLKTLVATAEAELAKNVSLDNVLSTFISAARQGFVDSDVETKDVVECLKLSHQSDIEVTGDSCNNYMLTYNKVENMTPRDLGACIDCSARHINAQVAKSHNIALIWNVKDFMSLSEQLRKQIRSAAKKNNLPFKLTCATTRQVVNVVTTKIALKGGKIVNNWLKQLIKVTLVFLFVAAIFYLITPVHVMSKHTDFSSEIIGYKAIDGGVTRDIASTDTCFANKHADFDTWFSQRGGSYTNDKACPLIAAVITREVGFVVPGLPGTILRTTNGDFLHFLPRVFSAVGNICYTPSKLIEYTDFATSACVLAAECTIFKDASGKPVPYCYDTNVLEGSVAYESLRPDTRYVLMDGSIIQFPNTYLEGSVRVVTTFDSEYCRHGTCERSEAGVCVSTSGRWVLNNDYYRSLPGVFCGVDAVNLLTNMFTPLIQPIGALDISASIVAGGIVAIVVTCLAYYFMRFRRAFGEYSHVVAFNTLLFLMSFTVLCLTPVYSFLPGVYSVIYLYLTFYLTNDVSFLAHIQWMVMFTPLVPFWITIAYIICISTKHFYWFFSNYLKRRVVFNGVSFSTFEEAALCTFLLNKEMYLKLRSDVLLPLTQYNRYLALYNKYKYFSGAMDTTSYREAACCHLAKALNDFSNSGSDVLYQPPQTSITSAVLQSGFRKMAFPSGKVEGCMVQVTCGTTTLNGLWLDDVVYCPRHVICTSEDMLNPNYEDLLIRKSNHNFLVQAGNVQLRVIGHSMQNCVLKLKVDTANPKTPKYKFVRIQPGQTFSVLACYNGSPSGVYQCAMRPNFTIKGSFLNGSCGSVGFNIDYDCVSFCYMHHMELPTGVHAGTDLEGNFYGPFVDRQTAQAAGTDTTITVNVLAWLYAAVINGDRWFLNRFTTTLNDFNLVAMKYNYEPLTQDHVDILGPLSAQTGIAVLDMCASLKELLQNGMNGRTILGSALLEDEFTPFDVVRQCSGVTFQSAVKRTIKGTHHWLLLTILTSLLVLVQSTQWSLFFFLYENAFLPFAMGIIAMSAFAMMFVKHKHAFLCLFLLPSLATVAYFNMVYMPASWVMRIMTWLDMVDTSLSGFKLKDCVMYASAVVLLILMTARTVYDDGARRVWTLMNVLTLVYKVYYGNALDQAISMWALIISVTSNYSGVVTTVMFLARGIVFMCVEYCPIFFITGNTLQCIMLVYCFLGYFCTCYFGLFCLLNRYFRLTLGVYDYLVSTQEFRYMNSQGLLPPKNSIDAFKLNIKLLGVGGKPCIKVATVQSKMSDVKCTSVVLLSVLQQLRVESSSKLWAQCVQLHNDILLAKDTTEAFEKMVSLLSVLLSMQGAVDINKLCEEMLDNRATLQAIASEFSSLPSYAAFATAQEAYEQAVANGDSEVVLKKLKKSLNVAKSEFDRDAAMQRKLEKMADQAMTQMYKQARSEDKRAKVTSAMQTMLFTMLRKLDNDALNNIINNARDGCVPLNIIPLTTAAKLMVVIPDYNTYKNTCDGTTFTYASALWEIQQVVDADSKIVQLSEISMDNSPNLAWPLIVTALRANSAVKLQNNELSPVALRQMSCAAGTTQTACTDDNALAYYNTTKGGRFVLALLSDLQDLKWARFPKSDGTGTIYTELEPPCRFVTDTPKGPKVKYLYFIKGLNNLNRGMVLGSLAATVRLQAGNATEVPANSTVLSFCAFAVDAAKAYKDYLASGGQPITNCVKMLCTHTGTGQAITVTPEANMDQESFGGASCCLYCRCHIDHPNPKGFCDLKGKYVQIPTTCVNDPVGFTLKNTVCTVCGMWKGYGCSCDQLREPMLQSADAQSFLNRVCGVSAARLTPCGTGTSTDVVYRAFDIYNDKVAGFAKFLKTNCCRFQEKDEDDNLIDSYFVVKRHTFSNYQHEETIYNLLKDCPAVAKHDFFKFRIDGDMVPHISRQRLTKYTMADLVYALRHFDEGNCDTLKEILVTYNCCDDDYFNKKDWYDFVENPDILRVYANLGERVRQALLKTVQFCDAMRNAGIVGVLTLDNQDLNGNWYDFGDFIQTTPGSGVPVVDSYYSLLMPILTLTRALTAESHVDTDLTKPYIKWDLLKYDFTEERLKLFDRYFKYWDQTYHPNCVNCLDDRCILHCANFNVLFSTVFPLTSFGPLVRKIFVDGVPFVVSTGYHFRELGVVHNQDVNLHSSRLSFKELLVYAADPAMHAASGNLLLDKRTTCFSVAALTNNVAFQTVKPGNFNKDFYDFAVSKGFFKEGSSVELKHFFFAQDGNAAISDYDYYRYNLPTMCDIRQLLFVVEVVDKYFDCYDGGCINANQVIVNNLDKSAGFPFNKWGKARLYYDSMSYEDQDALFAYTKRNVIPTITQMNLKYAISAKNRARTVAGVSICSTMTNRQFHQKLLKSIAATRGATVVIGTSKFYGGWHNMLKTVYSDVENPHLMGWDYPKCDRAMPNMLRIMASLVLARKHTTCCSLSHRFYRLANECAQVLSEMVMCGGSLYVKPGGTSSGDATTAYANSVFNICQAVTANVNALLSTDGNKIADKYVRNLQHRLYECLYRNRDVDTDFVNEFYAYLRKHFSMMILSDDAVVCFNSTYASQGLVASIKNFKSVLYYQNNVFMSEAKCWTETDLTKGPHEFCSQHTMLVKQGDDYVYLPYPDPSRILGAGCFVDDIVKTDGTLMIERFVSLAIDAYPLTKHPNQEYADVFHLYLQYIRKLHDELTGHMLDMYSVMLTNDNTSRYWEPEFYEAMYTPHTVLQAVGACVLCNSQTSLRCGACIRRPFLCCKCCYDHVISTSHKLVLSVNPYVCNAPGCDVTDVTQLYLGGMSYYCKSHKPPISFPLCANGQVFGLYKNTCVGSDNVTDFNAIATCDWTNAGDYILANTCTERLKLFAAETLKATEETFKLSYGIATVREVLSDRELHLSWEVGKPRPPLNRNYVFTGYRVTKNSKVQIGEYTFEKGDYGDAVVYRGTTTYKLNVGDYFVLTSHTVMPLSAPTLVPQEHYVRITGLYPTLNISDEFSSNVANYQKVGMQKYSTLQGPPGTGKSHFAIGLALYYPSARIVYTACSHAAVDALCEKALKYLPIDKCSRIIPARARVDCFDKFKVNSTLEQYVFCTVNALPETTADIVVFDEISMATNYDLSVVNARLRAKHYVYIGDPAQLPAPRTLLTKGTLEPEYFNSVCRLMKTIGPDMFLGTCRRCPAEIVDTVSALVYDNKLKAHKDKSAQCFKMFYKGVITHDVSSAINRPQIGVVREFLTRNPAWRKAVFISPYNSQNAVASKILGLPTQTVDSSQGSEYDYVIFTQTTETAHSCNVNRFNVAITRAKVGILCIMSDRDLYDKLQFTSLEIPRRNVATLQAENVTGLFKDCSKVITGLHPTQAPTHLSVDTKFKTEGLCVDIPGIPKDMTYRRLISMMGFKMNYQVNGYPNMFITREEAIRHVRAWIGFDVEGCHATREAVGTNLPLQLGFSTGVNLVAVPTGYVDTPNNTDFSRVSAKPPPGDQFKHLIPLMYKGLPWNVVRIKIVQMLSDTLRNLSDRVVFVLWAHGFELTSMKYFVKIGPERTCCLCDRRATCFSTASDTYACWHHSIGFDYVYNPFMIDVQQWGFTGNLQSNHDLYCQVHGNAHVASCDAIMTRCLAVHECFVKRVDWTIEYPIIGDELKINAACRKVQHMVVKAALLADKFPVLHDIGNPKAIKCVPQADVEWKFYDAQPCSDKAYKIEELFYSYATHSDKFTDGVCLFWNCNVDRYPANSIVCRFDTRVLSNLNLPGCDGGSLYVNKHAFHTPAFDKSAFVNLKQLPFFYYSDSPCESHGKQVVSDIDYVPLKSATCITRCNLGGAVCRHHANEYRLYLDAYNMMISAGFSLWVYKQFDTYNLWNTFTRLQSLENVAFNVVNKGHFDGQQGEVPVSIINNTVYTKVDGVDVELFENKTTLPVNVAFELWAKRNIKPVPEVKILNNLGVDIAANTVIWDYKRDAPAHISTIGVCSMTDIAKKPTETICAPLTVFFDGRVDGQVDLFRNARNGVLITEGSVKGLQPSVGPKQASLNGVTLIGEAVKTQFNYYKKVDGVVQQLPETYFTQSRNLQEFKPRSQMEIDFLELAMDEFIERYKLEGYAFEHIVYGDFSHSQLGGLHLLIGLAKRFKESPFELEDFIPMDSTVKNYFITDAQTGSSKCVCSVIDLLLDDFVEIIKSQDLSVVSKVVKVTIDYTEISFMLWCKDGHVETFYPKLQSSQAWQPGVAMPNLYKMQRMLLEKCDLQNYGDSATLPKGIMMNVAKYTQLCQYLNTLTLAVPYNMRVIHFGAGSDKGVAPGTAVLRQWLPTGTLLVDSDLNDFVSDADSTLIGDCATVHTANKWDLIISDMYDPKTKNVTKENDSKEGFFTYICGFIQQKLALGGSVAIKXXXXSWNADLYXLMGXXXXXXXXXXXXNASSSEXXXXXCXXXGKPREQIXXXXXXXXXXXXXXTNPIQLSSYSLFDMSKFPLKLRGTVVMSLKEGQINDMILSLLSKGRLIIRENNRVVISSDVLVNN

SEQ ID NO: 261-300 - skipped (40 entries)

SEQ ID NO: 301 - DNA, 21282 bp, Severe acute respiratory syndrome coronavirus 2
  source 1..21282: mol_type = unassigned DNA
atggagagccttgtccctggtttcaacgagaaaacacacgtccaactcagtttgcctgttttacaggttcgcgacgtgctcgtacgtggctttggagactccgtggaggaggtcttatcagaggcacgtcaacatcttaaagatggcacttgtggcttagtagaagttgaaaaaggcgttttgcctcaacttgaacagccctatgtgttcatcaaacgttcggatgctcgaactgcacctcatggtcatgttatggttgagctggtagcagaactcgaaggcattcagtacggtcgtagtggtgagacacttggtgtccttgtccctcatgtgggcgaaataccagtggcttaccgcaaggttcttcttcgtaagaacggtaataaaggagctggtggccatagttacggcgccgatctaaagtcatttgacttaggcgacgagcttggcactgatccttatgaagattttcaagaaaactggaacactaaacatagcagtggtgttacccgtgaactcatgcgtgagcttaacggaggggcatacactcgctatgtcgataacaacttctgtggccctgatggctaccctcttgagtgcattaaagaccttctagcacgtgctggtaaagcttcatgcactttgtctgaacaactggactttattgacactaagaggggtgtatactgctgccgtgaacatgagcatgaaattgcttggtacacggaacgttctgaaaagagctatgaattgcagacaccttttgaaattaaattggcaaagaaatttgacaccttcaatggggaatgtccaaattttgtatttcccttaaattccataatcaagactattcaaccaagggttgaaaagaaaaagcttgatggctttatgggtagaattcgatctgtctatccagttgcgtcaccaaatgaatgcaaccaaatgtgcctttcaactctcatgaagtgtgatcattgtggtgaaacttcatggcagacgggcgattttgttaaagccacttgcgaattttgtggcactgagaatttgactaaagaaggtgccactacttgtggttacttaccccaaaatgctgttgttaaaatttattgtccagcatgtcacaattcagaagtaggacctgagcatagtcttgccgaataccataatgaatctggcttgaaaaccattcttcgtaagggtggtcgcactattgcctttggaggctgtgtgttctcttatgttggttgccataacaagtgtgcctattgggttccacgtgctagcgctaacataggttgtaaccatacaggtgttgttggagaaggttccgaaggtcttaatgacaaccttcttgaaatactccaaaaagagaaagtcaacatcaatattgttggtgactttaaacttaatgaagagatcgccattattttggcatctttttctgcttccacaagtgcttttgtggaaactgtgaaaggtttggattataaagcattcaaacaaattgttgaatcctgtggtaattttaaagttacaaaaggaaaagctaaaaaaggtgcctggaatattggtgaacagaaatcaatactgagtcctctttatgcatttgcatcagaggctgctcgtgttgtacgatcaattttctcccgcactcttgaaactgctcaaaattctgtgcgtgttttacagaaggccgctataacaatactagatggaatttcacagtattcactgagactcattgatgctatgatgttcacatctgatttggctactaacaatctagttgtaatggcctacattacaggtggtgttgttcagttgacttcgcagtggctaactaacatctttggcactgtttatgaaaaactcaaacccgtccttgattggcttgaagagaagtttaaggaaggtgtagagtttcttagagacggttgggaaattgttaaatttatctcaacctgtgcttgtgaaattgtcggtggacaaattgtcacctgtgcaaaggaaattaaggagagtgttcagacattctttaagcttgtaaataaatttttggctttgtgtgctgactctatcattattggtggagctaaacttaaagccttgaatttaggtgaaacatttgtcacgcactcaaagggattgtacagaaagtgtgttaaatccagagaagaaactggcctactcatgcctctaaaagccccaaaagaaattatcttcttagagggagaaacacttcccacagaagtgttaacagaggaagttgtcttgaaaactggtgatttacaaccattagaacaacctactagtgaagctgttgaagctccattggttggtacaccagtttgtattaacgggcttatgttgctcgaaatcaaagacacagaaaagtactgtgcccttgcacctaatatgatggtaacaaacaataccttcacactcaaaggcggtgcaccaacaaaggttacttttggtgatgacactgtgatagaagtgcaaggttacaagagtgtgaatatcacttttgaacttgatgaaaggattgataaagtacttaatgagaagtgctctgcctatacagttgaactcggtacagaagtaaatgagttcgcctgtgttgtggcagatgctgtcataaaaactttgcaaccagtatctgaattacttacaccactgggcattgatttagatgagtggagtatggctacatactacttatttgatgagtctggtgagtttaaattggcttcacatatgtattgttctttttaccctccagatgaggatgaagaagaaggtgattgtgaagaagaagagtttgagccatcaactcaatatgagtatggtactgaagatgattaccaaggtaaacctttggaatttggtgccacttctgctgctcttcaacctgaagaagagcaagaagaagattggttagatgatgatagtcaacaaactgttggtcaacaagacggcagtgaggacaatcagacaactattattcaaacaattgttgaggttcaacctcaattagagatggaacttacaccagttgttcagactattgaagtgaatagttttagtggttatttaaaacttactgacaatgtatacattaaaaatgcagacattgtggaagaagctaaaaaggtaaaaccaacagtggttgttaatgcagccaatgtttaccttaaacatggaggaggtgttgcaggagccttaaataaggctactaacaatgccatgcaagttgaatctgatgattacatagctactaatggaccacttaaagtgggtggtagttgtgttttaagcggacacaatcttgctaaacactgtcttcatgttgtcggcccaaatgttaacaaaggtgaagacattcaacttcttaagagtgcttatgaaaattttaatcagcacgaagttctacttgcaccattattatcagctggtatttttggtgctgaccctatacattctttaagagtttgtgtagatactgttcgcacaaatgtctacttagctgtctttgataaaaatctctatgacaaacttgtttcaagctttttggaaatgaagagtgaaaagcaagttgaacaaaagatcgctgagattcctaaagaggaagttaagccatttataactgaaagtaaaccttcagttgaacagagaaaacaagatgataagaaaatcaaagcttgtgttgaagaagttacaacaactctggaagaaactaagttcctcacagaaaacttgttactttatattgacattaatggcaatcttcatccagattctgccactcttgttagtgacattgacatcactttcttaaagaaagatgctccatatatagtgggtgatgttgttcaagagggtgttttaactgctgtggttatacctactaaaaaggctggtggcactactgaaatgctagcgaaagctttgagaaaagtgccaacagacaattatataaccacttacccgggtcagggtttaaatggttacactgtagaggaggcaaagacagtgcttaaaaagtgtaaaagtgccttttacattctaccatctattatctctaatgagaagcaagaaattcttggaactgtttcttggaatttgcgagaaatgcttgcacatgcagaagaaacacgcaaattaatgcctgtctgtgtggaaactaaagccatagtttcaactatacagcgtaaatataagggtattaaaatacaagagggtgtggttgattatggtgctagattttacttttacaccagtaaaacaactgtagcgtcacttatcaacacacttaacgatctaaatgaaactcttgttacaatgccacttggctatgtaacacatggcttaaatttggaagaagctgctcggtatatgagatctctcaaagtgccagctacagtttctgtttcttcacctgatgctgttacagcgtataatggttatcttacttcttcttctaaaacacctgaagaacattttattgaaaccatctcacttgctggttcctataaagattggtcctattctggacaatctacacaactaggtatagaatttcttaagagaggtgataaaagtgtatattacactagtaatcctaccacattccacctagatggtgaagttatcacctttgacaatcttaagacacttctttctttgagagaagtgaggactattaaggtgtttacaacagtagacaacattaacctccacacgcaagttgtggacatgtcaatgacatatggacaacagtttggtccaacttatttggatggagctgatgttactaaaataaaacctcataattcacatgaaggtaaaacattttatgttttacctaatgatgacactctacgtgttgaggcttttgagtactaccacacaactgatcctagttttctgggtaggtacatgtcagcattaaatcacactaaaaagtggaaatacccacaagttaatggtttaacttctataaaatgggcagataacaactgttatcttgccactgcattgttaacactccaacaaatagagttgaagtttaatccacctgctctacaagatgcttattacagagcaagggctggtgaagctgataacttttgtgcacttatcttagcctactgtaataagacagtaggtgagttaggtgatgttagagaaacaatgagttacttgtttcaacatgccaatttagattcttgcaaaagagtcttgaacgtggtgtgtaaaacttgtggacaacagcagacaacccttaagggtgtagaagctgttatgtacatgggcacactttcttatgaacaatttaagaaaggtgttcagataccttgtacgtgtggtaaacaagctacaaaatatctagtacaacaggagtcaccttttgttatgatgtcagcaccacctgctcagtatgaacttaagcatggtacatttacttgtgctagtgagtacactggtaattaccagtgtggtcactataaacatataacttctaaagaaactttgtattgcatagacggtgctttacttacaaagtcctcagaatacaaaggtcctattacggatgttttctacaaagaaaacagttacacaacaaccataaaaccagttacttataaattggatggtgttgtttgtacagaaattgaccctaagttggacaattattataagaaagacaattcttattttacagagcaaccaattgatcttgtaccaaaccaaccatatccaaacgcaagcttcgataattttaagtttgtatgtgataatatcaaatttgctgatgatttaaaccagttaactggttataagaaacctgcttcaagagagcttaaagttacatttttccctgacttaaatggtgatgtggtggctattgattataaacactacacaccctcttttaagaaaggagctaaattgttacataaacctattgtttggcatgttaacaatgcaactaataaagccacgtataaaccaaatacctggtgtatacgttgtctttggagcacaaaaccagttgaaacatcaaattcgtttgatgtactgaagtcagaggacgcgcagggaatggataatcttgcctgcgaagatctaaaaccagtctctgaagaagtagtggaaaatcctaccatacagaaagacgttcttgagtgtaatgtgaaaactaccgaagttgtaggagacattatacttaaaccagcaaataatagtttaaaaattacagaagaggttggccacacagatctaatggctgcttatgtagacaattctagtcttactattaagaaacctaatgaattatctagagtattaggtttgaaaacccttgctactcatggtttagctgctgttaatagtgtcccttgggatactatagctaattatgctaagccttttcttaacaaagttgttagtacaactactaacatagttacacggtgtttaaaccgtgtttgtactaattatatgccttatttctttactttattgctacaattgtgtacttttactagaagtacaaattctagaattaaagcatctatgccgactactatagcaaagaatactgttaagagtgtcggtaaattttgtctagaggcttcatttaattatttgaagtcacctaatttttctaaactgataaatattacaatttggtttttactattaagtgtttgcctaggttctttaatctactcaaccgctgctttaggtgttttaatgtctaatttaggcatgccttcttactgtactggttacagagaaggctatttgaactctactaatgtcactattgcaacctactgtactggttctataccttgtagtgtttgtcttagtggtttagattctttagacacctatccttctttagaaactatacaaattaccatttcatcttttaaatgggatttaactgcttttggcttagttgcagagtggtttttggcatatattcttttcactaggtttttctatgtacttggattggctgcaatcatgcaattgtttttcagctattttgcagtacattttattagtaattcttggcttatgtggttaataattaatcttgtacaaatggccccgatttcagctatggttagaatgtacatcttctttgcatcattttattatgtatggaaaagttatgtgcatgttgtagacggttgtaattcatcaacttgtatgatgtgttacaaacgtaatagagcaacaagagtcgaatgtacaactattgttaatggtgttagaaggtccttttatgtctatgctaatggaggtaaaggcttttgcaaactacacaattggaattgtgttaattgtgatacattctgtgctggtagtacatttattagtgatgaagttgcgagagacttgtcactacagtttaaaagaccaataaatcctactgaccagtcttcttacatcgttgatagtgttacagtgaagaatggttccatccatctttactttgataaagctggtcaaaagacttatgaaagacattctctctctcattttgttaacttagacaacctgagagctaataacactaaaggttcattgcctattaatgttatagtttttgatggtaaatcaaaatgtgaagaatcatctgcaaaatcagcgtctgtttactacagtcagcttatgtgtcaacctatactgttactagatcaggcattagtgtctgatgttggtgatagtgcggaagttgcagttaaaatgtttgatgcttacgttaatacgttttcatcaacttttaacgtaccaatggaaaaactcaaaacactagttgcaactgcagaagctgaacttgcaaagaatgtgtccttagacaatgtcttatctacttttatttcagcagctcggcaagggtttgttgattcagatgtagaaactaaagatgttgttgaatgtcttaaattgtcacatcaatctgacatagaagttactggcgatagttgtaataactatatgctcacctataacaaagttgaaaacatgacaccccgtgaccttggtgcttgtattgactgtagtgcgcgtcatattaatgcgcaggtagcaaaaagtcacaacattgctttgatatggaacgttaaagatttcatgtcattgtctgaacaactacgaaaacaaatacgtagtgctgctaaaaagaataacttaccttttaagttgacatgtgcaactactagacaagttgttaatgttgtaacaacaaagatagcacttaagggtggtaaaattgttaataattggttgaagcagttaattaaagttacacttgtgttcctttttgttgctgctattttctatttaataacacctgttcatgtcatgtctaaacatactgacttttcaagtgaaatcataggatacaaggctattgatggtggtgtcactcgtgacatagcatctacagatacttgttttgctaacaaacatgctgattttgacacatggtttagccagcgtggtggtagttatactaatgacaaagcttgcccattgattgctgcagtcataacaagagaagtgggttttgtcgtgcctggtttgcctggcacgatattacgcacaactaatggtgactttttgcatttcttacctagagtttttagtgcagttggtaacatctgttacacaccatcaaaacttatagagtacactgactttgcaacatcagcttgtgttttggctgctgaatgtacaatttttaaagatgcttctggtaagccagtaccatattgttatgataccaatgtactagaaggttctgttgcttatgaaagtttacgccctgacacacgttatgtgctcatggatggctctattattcaatttcctaacacctaccttgaaggttctgttagagtggtaacaacttttgattctgagtactgtaggcacggcacttgtgaaagatcagaagctggtgtttgtgtatctactagtggtagatgggtacttaacaatgattattacagatctttaccaggagttttctgtggtgtagatgctgtaaatttacttactaatatgtttacaccactaattcaacctattggtgctttggacatatcagcatctatagtagctggtggtattgtagctatcgtagtaacatgccttgcctactattttatgaggtttagaagagcttttggtgaatacagtcatgtagttgcctttaatactttactattccttatgtcattcactgtactctgtttaacaccagtttactcattcttacctggtgtttattctgttatttacttgtacttgacattttatcttactaatgatgtttcttttttagcacatattcagtggatggttatgttcacacctttagtacctttctggataacaattgcttatatcatttgtatttccacaaagcatttctattggttctttagtaattacctaaagagacgtgtagtctttaatggtgtttcctttagtacttttgaagaagctgcgctgtgcacctttttgttaaataaagaaatgtatctaaagttgcgtagtgatgtgctattacctcttacgcaatataatagatacttagctctttataataagtacaagtattttagtggagcaatggatacaactagctacagagaagctgcttgttgtcatctcgcaaaggctctcaatgacttcagtaactcaggttctgatgttctttaccaaccaccacaaacctctatcacctcagctgttttgcagagtggttttagaaaaatggcattcccatctggtaaagttgagggttgtatggtacaagtaacttgtggtacaactacacttaacggtctttggcttgatgacgtagtttactgtccaagacatgtgatctgcacctctgaagacatgcttaaccctaattatgaagatttactcattcgtaagtctaatcataatttcttggtacaggctggtaatgttcaactcagggttattggacattctatgcaaaattgtgtacttaagcttaaggttgatacagccaatcctaagacacctaagtataagtttgttcgcattcaaccaggacagactttttcagtgttagcttgttacaatggttcaccatctggtgtttaccaatgtgctatgaggcccaatttcactattaagggttcattccttaatggttcatgtggtagtgttggttttaacatagattatgactgtgtctctttttgttacatgcaccatatggaattaccaactggagttcatgctggcacagacttagaaggtaacttttatggaccttttgttgacaggcaaacagcacaagcagctggtacggacacaactattacagttaatgttttagcttggttgtacgctgctgttataaatggagacaggtggtttctcaatcgatttaccacaactcttaatgactttaaccttgtggctatgaagtacaattatgaacctctaacacaagaccatgttgacatactaggacctctttctgctcaaactggaattgccgttttagatatgtgtgcttcattaaaagaattactgcaaaatggtatgaatggacgtaccatattgggtagtgctttattagaagatgaatttacaccttttgatgttgttagacaatgctcaggtgttactttccaaagtgcagtgaaaagaacaatcaagggtacacaccactggttgttactcacaattttgacttcacttttagttttagtccagagtactcaatggtctttgttcttttttttgtatgaaaatgcctttttaccttttgctatgggtattattgctatgtctgcttttgcaatgatgtttgtcaaacataagcatgcatttctctgtttgtttttgttaccttctcttgccactgtagcttattttaatatggtctatatgcctgctagttgggtgatgcgtattatgacatggttggatatggttgatactagtttgaagctaaaagactgtgttatgtatgcatcagctgtagtgttactaatccttatgacagcaagaactgtgtatgatgatggtgctaggagagtgtggacacttatgaatgtcttgacactcgtttataaagtttattatggtaatgctttagatcaagccatttccatgtgggctcttataatctctgttacttctaactactcaggtgtagttacaactgtcatgtttttggccagaggtattgtttttatgtgtgttgagtattgccctattttcttcataactggtaatacacttcagtgtataatgctagtttattgtttcttaggctatttttgtacttgttactttggcctcttttgtttactcaaccgctactttagactgactcttggtgtttatgattacttagtttctacacaggagtttagatatatgaattcacagggactactcccacccaagaatagcatagatgccttcaaactcaacattaaattgttgggtgttggtggcaaaccttgtatcaaagtagccactgtacagtctaaaatgtcagatgtaaagtgcacatcagtagtcttactctcagttttgcaacaactcagagtagaatcatcatctaaattgtgggctcaatgtgtccagttacacaatgacattctcttagctaaagatactactgaagcctttgaaaaaatggtttcactactttctgttttgctttccatgcagggtgctgtagacataaacaagctttgtgaagaaatgctggacaacagggcaaccttacaagctatagcctcagagtttagttcccttccatcatatgcagcttttgctactgctcaagaagcttatgagcaggctgttgctaatggtgattctgaagttgttcttaaaaagttgaagaagtctttgaatgtggctaaatctgaatttgaccgtgatgcagccatgcaacgtaagttggaaaagatggctgatcaagctatgacccaaatgtataaacaggctagatctgaggacaagagggcaaaagttactagtgctatgcagacaatgcttttcactatgcttagaaagttggataatgatgcactcaacaacattatcaacaatgcaagagatggttgtgttcccttgaacataatacctcttacaacagcagccaaactaatggttgtcataccagactataacacatataaaaatacgtgtgatggtacaacatttacttatgcatcagcattgtgggaaatccaacaggttgtagatgcagatagtaaaattgttcaacttagtgaaattagtatggacaattcacctaatttagcatggcctcttattgtaacagctttaagggccaattctgctgtcaaattacagaataatgagcttagtcctgttgcactacgacagatgtcttgtgctgccggtactacacaaactgcttgcactgatgacaatgcgttagcttactacaacacaacaaagggaggtaggtttgtacttgcactgttatccgatttacaggatttgaaatgggctagattccctaagagtgatggaactggtactatctatacagaactggaaccaccttgtaggtttgttacagacacacctaaaggtcctaaagtgaagtatttatactttattaaaggattaaacaacctaaatagaggtatggtacttggtagtttagctgccacagtacgtctacaagctggtaatgcaacagaagtgcctgccaattcaactgtattatctttctgtgcttttgctgtagatgctgctaaagcttacaaagattatctagctagtgggggacaaccaatcactaattgtgttaagatgttgtgtacacacactggtactggtcaggcaataacagttacaccggaagccaatatggatcaagaatcctttggtggtgcatcgtgttgtctgtactgccgttgccacatagatcatccaaatcctaaaggattttgtgacttaaaaggtaagtatgtacaaatacctacaacttgtgctaatgaccctgtgggttttacacttaaaaacacagtctgtaccgtctgcggtatgtggaaaggttatggctgtagttgtgatcaactccgcgaacccatgcttcagtcagctgatgcacaatcgtttttaaaccgggtttgcggtgtaagtgcagcccgtcttacaccgtgcggcacaggcactagtactgatgtcgtatacagggcttttgacatctacaatgataaagtagctggttttgctaaattcctaaaaactaattgttgtcgcttccaagaaaaggacgaagatgacaatttaattgattcttactttgtagttaagagacacactttctctaactaccaacatgaagaaacaatttataatttacttaaggattgtccagctgttgctaaacatgacttctttaagtttagaatagacggtgacatggtaccacatatatcacgtcaacgtcttactaaatacacaatggcagacctcgtctatgctttaaggcattttgatgaaggtaattgtgacacattaaaagaaatacttgtcacatacaattgttgtgatgatgattatttcaataaaaaggactggtatgattttgtagaaaacccagatatattacgcgtatacgccaacttaggtgaacgtgtacgccaagctttgttaaaaacagtacaattctgtgatgccatgcgaaatgctggtattgttggtgtactgacattagataatcaagatctcaatggtaactggtatgatttcggtgatttcatacaaaccacgccaggtagtggagttcctgttgtagattcttattattcattgttaatgcctatattaaccttgaccagggctttaactgcagagtcacatgttgacactgacttaacaaagccttacattaagtgggatttgttaaaatatgacttcacggaagagaggttaaaactctttgaccgttattttaaatattgggatcagacataccacccaaattgtgttaactgtttggatgacagatgcattctgcattgtgcaaactttaatgttttattctctacagtgttcccacttacaagttttggaccactagtgagaaaaatatttgttgatggtgttccatttgtagtttcaactggataccacttcagagagctaggtgttgtacataatcaggatgtaaacttacatagctctagacttagttttaaggaattacttgtgtatgctgctgaccctgctatgcacgctgcttctggtaatctattactagataaacgcactacgtgcttttcagtagctgcacttactaacaatgttgcttttcaaactgtcaaacctggtaattttaacaaagacttctatgactttgctgtgtctaagggtttctttaaggaaggaagttctgttgaattaaaacacttcttctttgctcaggatggtaatgctgctatcagcgattatgactactatcgttataatctaccaacaatgtgtgatatcagacaactactatttgtagttgaagttgttgataagtactttgattgttacgatggtggctgtattaatgctaaccaagtcatcgtcaacaacctagacaaatcagctggttttccatttaataaatggggtaaggctagactttattatgattcaatgagttatgaggatcaagatgcacttttcgcatatacaaaacgtaatgtcatccctactataactcaaatgaatcttaagtatgccattagtgcaaagaatagagctcgcaccgtagctggtgtctctatctgtagtactatgaccaatagacagtttcatcaaaaattattgaaatcaatagccgccactagaggagctactgtagtaattggaacaagcaaattctatggtggttggcacaacatgttaaaaactgtttatagtgatgtagaaaaccctcatcttatgggttgggattatcctaaatgtgatagagccatgcctaacatgcttagaattatggcctcacttgttcttgctcgcaaacatacaacgtgttgtagcttgtcacaccgtttctatagattagctaatgagtgtgctcaagtattgagtgaaatggtcatgtgtggcggttcactatatgttaaaccaggtggaacctcatcaggagatgccacaactgcttatgctaatagtgtttttaacatttgtcaagctgtcacggccaatgttaatgcacttttatctactgatggtaacaaaattgccgataagtatgtccgcaatttacaacacagactttatgagtgtctctatagaaatagagatgttgacacagactttgtgaatgagttttacgcatatttgcgtaaacatttctcaatgatgatactctctgacgatgctgttgtgtgtttcaatagcacttatgcatctcaaggtctagtggctagcataaagaactttaagtcagttctttattatcaaaacaatgtttttatgtctgaagcaaaatgttggactgagactgaccttactaaaggacctcatgaattttgctctcaacatacaatgctagttaaacagggtgatgattatgtgtaccttccttacccagatccatcaagaatcctaggggccggctgttttgtagatgatatcgtaaaaacagatggtacacttatgattgaacggttcgtgtctttagctatagatgcttacccacttactaaacatcctaatcaggagtatgctgatgtctttcatttgtacttacaatacataagaaagctacatgatgagttaacaggacacatgttagacatgtattctgttatgcttactaatgataacacctcaaggtattgggaacctgagttttatgaggctatgtacacaccgcatacagtcttacaggctgttggggcttgtgttctttgcaattcacagacttcattaagatgtggtgcttgcatacgtagaccattcttatgttgtaaatgctgttacgaccatgtcatatcaacatcacataaattagtcttgtctgttaatccgtatgtttgcaatgctccaggttgtgatgtcacagatgtgactcaactttacttaggaggtatgagctattattgtaaatcacataaaccatccattagttttccattgtgtgctaatggacaagtttttggtttatataaaaatacatgtgttggtagcgataatgttactgactttaatgcaattgcaacatgtgactggacaaatgctggtgattacattttagctaacacctgtactgaaagactcaagctttttgcagcagaaacgctcaaagctactgaggagacatttaaactgtcttatggtattgctactgtacgtgaagtgctgtctgacagagaattacatctttcatgggaagttggtaaacctagaccaccacttaaccgaaattatgtctttactggttatcgtgtaactaaaaacagtaaagtacaaataggagagtacacctttgaaaaaggtgactatggtgatgctgttgtttaccgaggtacaacaacttacaaattaaatgttggtgattattttgtgctgacatcacatacagtaatgccattaagtgcacctacactagtgccacaagagcactatgttagaattactggcttatacccaacactcaatatctcagatgagttttctagcaatgttgcaaattatcaaaaggttggtatgcaaaagtattctacactccagggaccacctggtactggtaagagtcattttgctattggcctagctctctactacccttctgctcgcatagtgtatacagcttgctctcatgccgctgttgatgcactatgtgagaaggcattaaaatatttgcctatagataaatgtagtagaattatacctgcacgtgctcgtgtagagtgttttgataaattcaaagtgaattcaacattagaacagtatgtcttttgtactgtaaatgcattgcctgagacgacagcagatatagttgtctttgatgaaatttcaatggccacaaattatgatttgagtgttgtcaatgccagattacgtgctaagcactatgtgtacattggcgaccctgctcaattacctgcaccacgcacattgctaactaagggcacactagaaccagaatatttcaattcagtgtgtagacttatgaaaactataggtccagacatgttcctcggaacttgtcggcgttgtcctgctgaaattgttgacactgtgagtgctttggtttatgataataggcttaaagcacataaagacaaatcagctcaatgctttaaaatgttttataagggtgttatcacgcatgatgtttcatctgcaattaacaggccacaaataggcgtggtaagagaattccttacacgtaaccctgcttggagaaaagctgtctttatttcaccttataattcacagaatgctgtagcctcaaagattttgggactaccaactcaaactgttgattcatcacagggctcagaatatgactatgtcatattcactcaaaccactgaaacagctcactcttgtaatgtaaacagatttaatgttgctattaccagagcaaaagtaggcatactttgcataatgtctgatagagacctttatgacaagttgcaatttacaagtcttgaaattccacgtaggaatgtggcaactttacaagctgaaaatgtaacaggactctttaaagattgtagtaaggtaatcactgggttacatcctacacaggcacctacacacctcagtgttgacactaaattcaaaactgaaggtttatgtgttgacatacctggcatacctaaggacatgacctatagaagactcatctctatgatgggttttaaaatgaattatcaagttaatggttaccctaacatgtttatcacccgcgaagaagctataagacatgtacgtgcatggattggcttcgatgtcgaggggtgtcatgctactagagaagctgttggtaccaatttacctttacagctaggtttttctacaggtgttaacctagttgctgtacctacaggttatgttgatacacctaataatacagatttttccagagttagtgctaaaccaccgcctggagatcaatttaaacacctcataccacttatgtacaaaggacttccttggaatgtagtgcgtataaagattgtacaaatgttaagtgacacacttaaaaatctctctgacagagtcgtatttgtcttatgggcacatggctttgagttgacatctatgaagtattttgtgaaaataggacctgagcgcacctgttgtctatgtgatagacgtgccacatgcttttccactgcttcagacacttatgcctgttggcatcattctattggatttgattacgtctataatccgtttatgattgatgttcaacaatggggttttacaggtaacctacaaagcaaccatgatctgtattgtcaagtccatggtaatgcacatgtagctagttgtgatgcaatcatgactaggtgtctagctgtccacgagtgctttgttaagcgtgttgactggactattgaatatcctataattggtgatgaactgaagattaatgcggcttgtagaaaggttcaacacatggttgttaaagctgcattattagcagacaaattcccagttcttcacgacattggtaaccctaaagctattaagtgtgtacctcaagctgatgtagaatggaagttctatgatgcacagccttgtagtgacaaagcttataaaatagaagaattattctattcttatgccacacattctgacaaattcacagatggtgtatgcctattttggaattgcaatgtcgatagatatcctgctaattccattgtttgtagatttgacactagagtgctatctaaccttaacttgcctggttgtgatggtggcagtttgtatgtaaataaacatgcattccacacaccagcttttgataaaagtgcttttgttaatttaaaacaattaccatttttctattactctgacagtccatgtgagtctcatggaaaacaagtagtgtcagatatagattatgtaccactaaagtctgctacgtgtataacacgttgcaatttaggtggtgctgtctgtagacatcatgctaatgagtacagattgtatctcgatgcttataacatgatgatctcagctggctttagcttgtgggtttacaaacaatttgatacttataacctctggaacacttttacaagacttcagagtttagaaaatgtggcttttaatgttgtaaataagggacactttgatggacaacagggtgaagtaccagtttctatcattaataacactgtttacacaaaagttgatggtgttgatgtagaattgtttgaaaataaaacaacattacctgttaatgtagcatttgagctttgggctaagcgcaacattaaaccagtaccagaggtgaaaatactcaataatttgggtgtggacattgctgctaatactgtgatctgggactacaaaagagatgctccagcacatatatctactattggtgtttgttctatgactgacatagccaagaaaccaactgaaacgatttgtgcaccactcactgtcttttttgatggtagagttgatggtcaagtagacttatttagaaatgcccgtaatggtgttcttattacagaaggtagtgttaaaggtttacaaccatctgtaggtcccaaacaagctagtcttaatggagtcacattaattggagaagccgtaaaaacacagttcaattattataagaaagttgatggtgttgtccaacaattacctgaaacttactttactcagagtagaaatttacaagaatttaaacccaggagtcaaatggaaattgatttcttagaattagctatggatgaattcattgaacggtataaattagaaggctatgccttcgaacatatcgtttatggagattttagtcatagtcagttaggtggtttacatctactgattggactagctaaacgttttaaggaatcaccttttgaattagaagattttattcctatggacagtacagttaaaaactatttcataacagatgcgcaaacaggttcatctaagtgtgtgtgttctgttattgatttattacttgatgattttgttgaaataataaaatcccaagatttatctgtagtttctaaggttgtcaaagtgactattgactatacagaaatttcatttatgctttggtgtaaagatggccatgtagaaacattttacccaaaattacaatctagtcaagcgtggcaaccgggtgttgctatgcctaatctttacaaaatgcaaagaatgctattagaaaagtgtgaccttcaaaattatggtgatagtgcaacattacctaaaggcataatgatgaatgtcgcaaaatatactcaactgtgtcaatatttaaacacattaacattagctgtaccctataatatgagagttatacattttggtgctggttctgataaaggagttgcaccaggtacagctgttttaagacagtggttgcctacgggtacgctgcttgtcgattcagatcttaatgactttgtctctgatgcagattcaactttgattggtgattgtgcaactgtacatacagctaataaatgggatctcattattagtgatatgtacgaccctaagactaaaaatgttacaaaagaaaatgactctaaagagggttttttcacttacatttgtgggtttatacaacaaaagctagctcttggaggttccgtggctataaagataacagaacattcttggaatgctgatctttataagctcatgggacacttcgcatggtggacagcctttgttactaatgtgaatgcgtcatcatctgaagcatttttaattggatgtaattatcttggcaaaccacgcgaacaaatagatggttatgtcatgcatgcaaattacatattttggaggaatacaaatccaattcagttgtcttcctattctttatttgacatgagtaaatttccccttaaattaaggggtactgctgttatgtctttaaaagaaggtcaaatcaatgatatgattttatctcttcttagtaaaggtagacttataattagagaaaacaacagagttgttatttctagtgatgttcttgttaacaactaa

SEQ ID NO: 302 - DNA, 13209 bp, Severe acute respiratory syndrome coronavirus 2
  source 1..13209: mol_type = unassigned DNA
atggagagccttgtccctggtttcaacgagaaaacacacgtccaactcagtttgcctgttttacaggttcgcgacgtgctcgtacgtggctttggagactccgtggaggaggtcttatcagaggcacgtcaacatcttaaagatggcacttgtggcttagtagaagttgaaaaaggcgttttgcctcaacttgaacagccctatgtgttcatcaaacgttcggatgctcgaactgcacctcatggtcatgttatggttgagctggtagcagaactcgaaggcattcagtacggtcgtagtggtgagacacttggtgtccttgtccctcatgtgggcgaaataccagtggcttaccgcaaggttcttcttcgtaagaacggtaataaaggagctggtggccatagttacggcgccgatctaaagtcatttgacttaggcgacgagcttggcactgatccttatgaagattttcaagaaaactggaacactaaacatagcagtggtgttacccgtgaactcatgcgtgagcttaacggaggggcatacactcgctatgtcgataacaacttctgtggccctgatggctaccctcttgagtgcattaaagaccttctagcacgtgctggtaaagcttcatgcactttgtctgaacaactggactttattgacactaagaggggtgtatactgctgccgtgaacatgagcatgaaattgcttggtacacggaacgttctgaaaagagctatgaattgcagacaccttttgaaattaaattggcaaagaaatttgacaccttcaatggggaatgtccaaattttgtatttcccttaaattccataatcaagactattcaaccaagggttgaaaagaaaaagcttgatggctttatgggtagaattcgatctgtctatccagttgcgtcaccaaatgaatgcaaccaaatgtgcctttcaactctcatgaagtgtgatcattgtggtgaaacttcatggcagacgggcgattttgttaaagccacttgcgaattttgtggcactgagaatttgactaaagaaggtgccactacttgtggttacttaccccaaaatgctgttgttaaaatttattgtccagcatgtcacaattcagaagtaggacctgagcatagtcttgccgaataccataatgaatctggcttgaaaaccattcttcgtaagggtggtcgcactattgcctttggaggctgtgtgttctcttatgttggttgccataacaagtgtgcctattgggttccacgtgctagcgctaacataggttgtaaccatacaggtgttgttggagaaggttccgaaggtcttaatgacaaccttcttgaaatactccaaaaagagaaagtcaacatcaatattgttggtgactttaaacttaatgaagagatcgccattattttggcatctttttctgcttccacaagtgcttttgtggaaactgtgaaaggtttggattataaagcattcaaacaaattgttgaatcctgtggtaattttaaagttacaaaaggaaaagctaaaaaaggtgcctggaatattggtgaacagaaatcaatactgagtcctctttatgcatttgcatcagaggctgctcgtgttgtacgatcaattttctcccgcactcttgaaactgctcaaaattctgtgcgtgttttacagaaggccgctataacaatactagatggaatttcacagtattcactgagactcattgatgctatgatgttcacatctgatttggctactaacaatctagttgtaatggcctacattacaggtggtgttgttcagttgacttcgcagtggctaactaacatctttggcactgtttatgaaaaactcaaacccgtccttgattggcttgaagagaagtttaaggaaggtgtagagtttcttagagacggttgggaaattgttaaatttatctcaacctgtgcttgtgaaattgtcggtggacaaattgtcacctgtgcaaaggaaattaaggagagtgttcagacattctttaagcttgtaaataaatttttggctttgtgtgctgactctatcattattggtggagctaaacttaaagccttgaatttaggtgaaacatttgtcacgcactcaaagggattgtacagaaagtgtgttaaatccagagaagaaactggcctactcatgcctctaaaagccccaaaagaaattatcttcttagagggagaaacacttcccacagaagtgttaacagaggaagttgtcttgaaaactggtgatttacaaccattagaacaacctactagtgaagctgttgaagctccattggttggtacaccagtttgtattaacgggcttatgttgctcgaaatcaaagacacagaaaagtactgtgcccttgcacctaatatgatggtaacaaacaataccttcacactcaaaggcggtgcaccaacaaaggttacttttggtgatgacactgtgatagaagtgcaaggttacaagagtgtgaatatcacttttgaacttgatgaaaggattgataaagtacttaatgagaagtgctctgcctatacagttgaactcggtacagaagtaaatgagttcgcctgtgttgtggcagatgctgtcataaaaactttgcaaccagtatctgaattacttacaccactgggcattgatttagatgagtggagtatggctacatactacttatttgatgagtctggtgagtttaaattggcttcacatatgtattgttctttttaccctccagatgaggatgaagaagaaggtgattgtgaagaagaagagtttgagccatcaactcaatatgagtatggtactgaagatgattaccaaggtaaacctttggaatttggtgccacttctgctgctcttcaacctgaagaagagcaagaagaagattggttagatgatgatagtcaacaaactgttggtcaacaagacggcagtgaggacaatcagacaactattattcaaacaattgttgaggttcaacctcaattagagatggaacttacaccagttgttcagactattgaagtgaatagttttagtggttatttaaaacttactgacaatgtatacattaaaaatgcagacattgtggaagaagctaaaaaggtaaaaccaacagtggttgttaatgcagccaatgtttaccttaaacatggaggaggtgttgcaggagccttaaataaggctactaacaatgccatgcaagttgaatctgatgattacatagctactaatggaccacttaaagtgggtggtagttgtgttttaagcggacacaatcttgctaaacactgtcttcatgttgtcggcccaaatgttaacaaaggtgaagacattcaacttcttaagagtgcttatgaaaattttaatcagcacgaagttctacttgcaccattattatcagctggtatttttggtgctgaccctatacattctttaagagtttgtgtagatactgttcgcacaaatgtctacttagctgtctttgataaaaatctctatgacaaacttgtttcaagctttttggaaatgaagagtgaaaagcaagttgaacaaaagatcgctgagattcctaaagaggaagttaagccatttataactgaaagtaaaccttcagttgaacagagaaaacaagatgataagaaaatcaaagcttgtgttgaagaagttacaacaactctggaagaaactaagttcctcacagaaaacttgttactttatattgacattaatggcaatcttcatccagattctgccactcttgttagtgacattgacatcactttcttaaagaaagatgctccatatatagtgggtgatgttgttcaagagggtgttttaactgctgtggttatacctactaaaaaggctggtggcactactgaaatgctagcgaaagctttgagaaaagtgccaacagacaattatataaccacttacccgggtcagggtttaaatggttacactgtagaggaggcaaagacagtgcttaaaaagtgtaaaagtgccttttacattctaccatctattatctctaatgagaagcaagaaattcttggaactgtttcttggaatttgcgagaaatgcttgcacatgcagaagaaacacgcaaattaatgcctgtctgtgtggaaactaaagccatagtttcaactatacagcgtaaatataagggtattaaaatacaagagggtgtggttgattatggtgctagattttacttttacaccagtaaaacaactgtagcgtcacttatcaacacacttaacgatctaaatgaaactcttgttacaatgccacttggctatgtaacacatggcttaaatttggaagaagctgctcggtatatgagatctctcaaagtgccagctacagtttctgtttcttcacctgatgctgttacagcgtataatggttatcttacttcttcttctaaaacacctgaagaacattttattgaaaccatctcacttgctggttcctataaagattggtcctattctggacaatctacacaactaggtatagaatttcttaagagaggtgataaaagtgtatattacactagtaatcctaccacattccacctagatggtgaagttatcacctttgacaatcttaagacacttctttctttgagagaagtgaggactattaaggtgtttacaacagtagacaacattaacctccacacgcaagttgtggacatgtcaatgacatatggacaacagtttggtccaacttatttggatggagctgatgttactaaaataaaacctcataattcacatgaaggtaaaacattttatgttttacctaatgatgacactctacgtgttgaggcttttgagtactaccacacaactgatcctagttttctgggtaggtacatgtcagcattaaatcacactaaaaagtggaaatacccacaagttaatggtttaacttctataaaatgggcagataacaactgttatcttgccactgcattgttaacactccaacaaatagagttgaagtttaatccacctgctctacaagatgcttattacagagcaagggctggtgaagctgataacttttgtgcacttatcttagcctactgtaataagacagtaggtgagttaggtgatgttagagaaacaatgagttacttgtttcaacatgccaatttagattcttgcaaaagagtcttgaacgtggtgtgtaaaacttgtggacaacagcagacaacccttaagggtgtagaagctgttatgtacatgggcacactttcttatgaacaatttaagaaaggtgttcagataccttgtacgtgtggtaaacaagctacaaaatatctagtacaacaggagtcaccttttgttatgatgtcagcaccacctgctcagtatgaacttaagcatggtacatttacttgtgctagtgagtacactggtaattaccagtgtggtcactataaacatataacttctaaagaaactttgtattgcatagacggtgctttacttacaaagtcctcagaatacaaaggtcctattacggatgttttctacaaagaaaacagttacacaacaaccataaaaccagttacttataaattggatggtgttgtttgtacagaaattgaccctaagttggacaattattataagaaagacaattcttattttacagagcaaccaattgatcttgtaccaaaccaaccatatccaaacgcaagcttcgataattttaagtttgtatgtgataatatcaaatttgctgatgatttaaaccagttaactggttataagaaacctgcttcaagagagcttaaagttacatttttccctgacttaaatggtgatgtggtggctattgattataaacactacacaccctcttttaagaaaggagctaaattgttacataaacctattgtttggcatgttaacaatgcaactaataaagccacgtataaaccaaatacctggtgtatacgttgtctttggagcacaaaaccagttgaaacatcaaattcgtttgatgtactgaagtcagaggacgcgcagggaatggataatcttgcctgcgaagatctaaaaccagtctctgaagaagtagtggaaaatcctaccatacagaaagacgttcttgagtgtaatgtgaaaactaccgaagttgtaggagacattatacttaaaccagcaaataatagtttaaaaattacagaagaggttggccacacagatctaatggctgcttatgtagacaattctagtcttactattaagaaacctaatgaattatctagagtattaggtttgaaaacccttgctactcatggtttagctgctgttaatagtgtcccttgggatactatagctaattatgctaagccttttcttaacaaagttgttagtacaactactaacatagttacacggtgtttaaaccgtgtttgtactaattatatgccttatttctttactttattgctacaattgtgtacttttactagaagtacaaattctagaattaaagcatctatgccgactactatagcaaagaatactgttaagagtgtcggtaaattttgtctagaggcttcatttaattatttgaagtcacctaatttttctaaactgataaatattacaatttggtttttactattaagtgtttgcctaggttctttaatctactcaaccgctgctttaggtgttttaatgtctaatttaggcatgccttcttactgtactggttacagagaaggctatttgaactctactaatgtcactattgcaacctactgtactggttctataccttgtagtgtttgtcttagtggtttagattctttagacacctatccttctttagaaactatacaaattaccatttcatcttttaaatgggatttaactgcttttggcttagttgcagagtggtttttggcatatattcttttcactaggtttttctatgtacttggattggctgcaatcatgcaattgtttttcagctattttgcagtacattttattagtaattcttggcttatgtggttaataattaatcttgtacaaatggccccgatttcagctatggttagaatgtacatcttctttgcatcattttattatgtatggaaaagttatgtgcatgttgtagacggttgtaattcatcaacttgtatgatgtgttacaaacgtaatagagcaacaagagtcgaatgtacaactattgttaatggtgttagaaggtccttttatgtctatgctaatggaggtaaaggcttttgcaaactacacaattggaattgtgttaattgtgatacattctgtgctggtagtacatttattagtgatgaagttgcgagagacttgtcactacagtttaaaagaccaataaatcctactgaccagtcttcttacatcgttgatagtgttacagtgaagaatggttccatccatctttactttgataaagctggtcaaaagacttatgaaagacattctctctctcattttgttaacttagacaacctgagagctaataacactaaaggttcattgcctattaatgttatagtttttgatggtaaatcaaaatgtgaagaatcatctgcaaaatcagcgtctgtttactacagtcagcttatgtgtcaacctatactgttactagatcaggcattagtgtctgatgttggtgatagtgcggaagttgcagttaaaatgtttgatgcttacgttaatacgttttcatcaacttttaacgtaccaatggaaaaactcaaaacactagttgcaactgcagaagctgaacttgcaaagaatgtgtccttagacaatgtcttatctacttttatttcagcagctcggcaagggtttgttgattcagatgtagaaactaaagatgttgttgaatgtcttaaattgtcacatcaatctgacatagaagttactggcgatagttgtaataactatatgctcacctataacaaagttgaaaacatgacaccccgtgaccttggtgcttgtattgactgtagtgcgcgtcatattaatgcgcaggtagcaaaaagtcacaacattgctttgatatggaacgttaaagatttcatgtcattgtctgaacaactacgaaaacaaatacgtagtgctgctaaaaagaataacttaccttttaagttgacatgtgcaactactagacaagttgttaatgttgtaacaacaaagatagcacttaagggtggtaaaattgttaataattggttgaagcagttaattaaagttacacttgtgttcctttttgttgctgctattttctatttaataacacctgttcatgtcatgtctaaacatactgacttttcaagtgaaatcataggatacaaggctattgatggtggtgtcactcgtgacatagcatctacagatacttgttttgctaacaaacatgctgattttgacacatggtttagccagcgtggtggtagttatactaatgacaaagcttgcccattgattgctgcagtcataacaagagaagtgggttttgtcgtgcctggtttgcctggcacgatattacgcacaactaatggtgactttttgcatttcttacctagagtttttagtgcagttggtaacatctgttacacaccatcaaaacttatagagtacactgactttgcaacatcagcttgtgttttggctgctgaatgtacaatttttaaagatgcttctggtaagccagtaccatattgttatgataccaatgtactagaaggttctgttgcttatgaaagtttacgccctgacacacgttatgtgctcatggatggctctattattcaatttcctaacacctaccttgaaggttctgttagagtggtaacaacttttgattctgagtactgtaggcacggcacttgtgaaagatcagaagctggtgtttgtgtatctactagtggtagatgggtacttaacaatgattattacagatctttaccaggagttttctgtggtgtagatgctgtaaatttacttactaatatgtttacaccactaattcaacctattggtgctttggacatatcagcatctatagtagctggtggtattgtagctatcgtagtaacatgccttgcctactattttatgaggtttagaagagcttttggtgaatacagtcatgtagttgcctttaatactttactattccttatgtcattcactgtactctgtttaacaccagtttactcattcttacctggtgtttattctgttatttacttgtacttgacattttatcttactaatgatgtttcttttttagcacatattcagtggatggttatgttcacacctttagtacctttctggataacaattgcttatatcatttgtatttccacaaagcatttctattggttctttagtaattacctaaagagacgtgtagtctttaatggtgtttcctttagtacttttgaagaagctgcgctgtgcacctttttgttaaataaagaaatgtatctaaagttgcgtagtgatgtgctattacctcttacgcaatataatagatacttagctctttataataagtacaagtattttagtggagcaatggatacaactagctacagagaagctgcttgttgtcatctcgcaaaggctctcaatgacttcagtaactcaggttctgatgttctttaccaaccaccacaaacctctatcacctcagctgttttgcagagtggttttagaaaaatggcattcccatctggtaaagttgagggttgtatggtacaagtaacttgtggtacaactacacttaacggtctttggcttgatgacgtagtttactgtccaagacatgtgatctgcacctctgaagacatgcttaaccctaattatgaagatttactcattcgtaagtctaatcataatttcttggtacaggctggtaatgttcaactcagggttattggacattctatgcaaaattgtgtacttaagcttaaggttgatacagccaatcctaagacacctaagtataagtttgttcgcattcaaccaggacagactttttcagtgttagcttgttacaatggttcaccatctggtgtttaccaatgtgctatgaggcccaatttcactattaagggttcattccttaatggttcatgtggtagtgttggttttaacatagattatgactgtgtctctttttgttacatgcaccatatggaattaccaactggagttcatgctggcacagacttagaaggtaacttttatggaccttttgttgacaggcaaacagcacaagcagctggtacggacacaactattacagttaatgttttagcttggttgtacgctgctgttataaatggagacaggtggtttctcaatcgatttaccacaactcttaatgactttaaccttgtggctatgaagtacaattatgaacctctaacacaagaccatgttgacatactaggacctctttctgctcaaactggaattgccgttttagatatgtgtgcttcattaaaagaattactgcaaaatggtatgaatggacgtaccatattgggtagtgctttattagaagatgaatttacaccttttgatgttgttagacaatgctcaggtgttactttccaaagtgcagtgaaaagaacaatcaagggtacacaccactggttgttactcacaattttgacttcacttttagttttagtccagagtactcaatggtctttgttcttttttttgtatgaaaatgcctttttaccttttgctatgggtattattgctatgtctgcttttgcaatgatgtttgtcaaacataagcatgcatttctctgtttgtttttgttaccttctcttgccactgtagcttattttaatatggtctatatgcctgctagttgggtgatgcgtattatgacatggttggatatggttgatactagtttgaagctaaaagactgtgttatgtatgcatcagctgtagtgttactaatccttatgacagcaagaactgtgtatgatgatggtgctaggagagtgtggacacttatgaatgtcttgacactcgtttataaagtttattatggtaatgctttagatcaagccatttccatgtgggctcttataatctctgttacttctaactactcaggtgtagttacaactgtcatgtttttggccagaggtattgtttttatgtgtgttgagtattgccctattttcttcataactggtaatacacttcagtgtataatgctagtttattgtttcttaggctatttttgtacttgttactttggcctcttttgtttactcaaccgctactttagactgactcttggtgtttatgattacttagtttctacacaggagtttagatatatgaattcacagggactactcccacccaagaatagcatagatgccttcaaactcaacattaaattgttgggtgttggtggcaaaccttgtatcaaagtagccactgtacagtctaaaatgtcagatgtaaagtgcacatcagtagtcttactctcagttttgcaacaactcagagtagaatcatcatctaaattgtgggctcaatgtgtccagttacacaatgacattctcttagctaaagatactactgaagcctttgaaaaaatggtttcactactttctgttttgctttccatgcagggtgctgtagacataaacaagctttgtgaagaaatgctggacaacagggcaaccttacaagctatagcctcagagtttagttcccttccatcatatgcagcttttgctactgctcaagaagcttatgagcaggctgttgctaatggtgattctgaagttgttcttaaaaagttgaagaagtctttgaatgtggctaaatctgaatttgaccgtgatgcagccatgcaacgtaagttggaaaagatggctgatcaagctatgacccaaatgtataaacaggctagatctgaggacaagagggcaaaagttactagtgctatgcagacaatgcttttcactatgcttagaaagttggataatgatgcactcaacaacattatcaacaatgcaagagatggttgtgttcccttgaacataatacctcttacaacagcagccaaactaatggttgtcataccagactataacacatataaaaatacgtgtgatggtacaacatttacttatgcatcagcattgtgggaaatccaacaggttgtagatgcagatagtaaaattgttcaacttagtgaaattagtatggacaattcacctaatttagcatggcctcttattgtaacagctttaagggccaattctgctgtcaaattacagaataatgagcttagtcctgttgcactacgacagatgtcttgtgctgccggtactacacaaactgcttgcactgatgacaatgcgttagcttactacaacacaacaaagggaggtaggtttgtacttgcactgttatccgatttacaggatttgaaatgggctagattccctaagagtgatggaactggtactatctatacagaactggaaccaccttgtaggtttgttacagacacacctaaaggtcctaaagtgaagtatttatactttattaaaggattaaacaacctaaatagaggtatggtacttggtagtttagctgccacagtacgtctacaagctggtaatgcaacagaagtgcctgccaattcaactgtattatctttctgtgcttttgctgtagatgctgctaaagcttacaaagattatctagctagtgggggacaaccaatcactaattgtgttaagatgttgtgtacacacactggtactggtcaggcaataacagttacaccggaagccaatatggatcaagaatcctttggtggtgcatcgtgttgtctgtactgccgttgccacatagatcatccaaatcctaaaggattttgtgacttaaaaggtaagtatgtacaaatacctacaacttgtgctaatgaccctgtgggttttacacttaaaaacacagtctgtaccgtctgcggtatgtggaaaggttatggctgtagttgtgatcaactccgcgaacccatgcttcagtcagctgatgcacaatcgtttttaaacgggtttgcggtgtaa

SEQ ID NO: 303 - DNA, 3813 bp, Severe acute respiratory syndrome coronavirus 2
  source 1..3813: mol_type = unassigned DNA
atgtttgtttttcttgttttattgccactagtctctagtcagtgtgttaatcttacaaccagaactcaattaccccctgcatacactaattctttcacacgtggtgtttattaccctgacaaagttttcagatcctcagttttacattcaactcaggacttgttcttacctttcttttccaatgttacttggttccatgctatctctgggaccaatggtactaagaggtttgataaccctgtcctaccatttaatgatggtgtttattttgcttccactgagaagtctaacataataagaggctggatttttggtactactttagattcgaagacccagtccctacttattgttaataacgctactaatgttgttattaaagtctgtgaatttcaattttgtaatgatccatttttgggtgtttaccacaaaaacaacaaaagttggatggaaagtgagttcagagtttattctagtgcgaataattgcacttttgaatatgtctctcagccttttcttatggaccttgaaggaaaacagggtaatttcaaaaatcttagggaatttgtgtttaagaatattgatggttattttaaaatatattctaagcacacgcctattaatttagtgcgtgatctccctcagggtttttcggctttagaaccattggtagatttgccaataggtattaacatcactaggtttcaaactttacttgctttacatagaagttatttgactcctggtgattcttcttcaggttggacagctggtgctgcagcttattatgtgggttatcttcaacctaggacttttctattaaaatataatgaaaatggaaccattacagatgctgtagactgtgcacttgaccctctctcagaaacaaagtgtacgttgaaatccttcactgtagaaaaaggaatctatcaaacttctaactttagagtccaaccaacagaatctattgttagatttcctaatattacaaacttgtgcccttttggtgaagtttttaacgccaccagatttgcatctgtttatgcttggaacaggaagagaatcagcaactgtgttgctgattattctgtcctatataattccgcatcattttccacttttaagtgttatggagtgtctcctactaaattaaatgatctctgctttactaatgtctatgcagattcatttgtaattagaggtgatgaagtcagacaaatcgctccagggcaaactggaaagattgctgattataattataaattaccagatgattttacaggctgcgttatagcttggaattctaacaatcttgattctaaggttggtggtaattataattacctgtatagattgtttaggaagtctaatctcaaaccttttgagagagatatttcaactgaaatctatcaggccggtagcacaccttgtaatggtgttgaaggttttaattgttactttcctttacaatcatatggtttccaacccacttatggtgttggttaccaaccatacagagtagtagtactttcttttgaacttctacatgcaccagcaactgtttgtggacctaaaaagtctactaatttggttaaaaacaaatgtgtcaatttcaacttcaatggtttaacaggcacaggtgttcttactgagtctaacaaaaagtttctgcctttccaacaatttggcagagacattgatgacactactgatgctgtccgtgatccacagacacttgagattcttgacattacaccatgttcttttggtggtgtcagtgttataacaccaggaacaaatacttctaaccaggttgctgttctttatcagggtgttaactgcacagaagtccctgttgctattcatgcagatcaacttactcctacttggcgtgtttattctacaggttctaatgtttttcaaacacgtgcaggctgtttaataggggctgaacatgtcaacaactcatatgagtgtgacatacccattggtgcaggtatatgcgctagttatcagactcagactaattctcatcggcgggcacgtagtgtagctagtcaatccatcattgcctacactatgtcacttggtgcagaaaattcagttgcttactctaataactctattgccatacccataaattttactattagtgttaccacagaaattctaccagtgtctatgaccaagacatcagtagattgtacaatgtacatttgtggtgattcaactgaatgcagcaatcttttgttgcaatatggcagtttttgtacacaattaaaccgtgctttaactggaatagctgttgaacaagacaaaaacacccaagaagtttttgcacaagtcaaacaaatttacaaaacaccaccaattaaagattttggtggttttaatttttcacaaatattaccagatccatcaaaaccaagcaagaggtcatttattgaagatctacttttcaacaaagtgacacttgcagatgctggcttcatcaaacaatatggtgattgccttggtgatattgctgctagagacctcatttgtgcacaaaagtttaacggccttactgttttgccacctttgctcacagatgaaatgattgctcaatacacttctgcactgttagcgggtacaatcacttctggttggacctttggtgcaggtgctgcattacaaataccatttgctatgcaaatggcttataggtttaatggtattggagttacacagaatgttctctatgagaaccaaaaattgattgccaaccaatttaatagtgctattggcaaaattcaagactcactttcttccacagcaagtgcacttggaaaacttcaagatgtggtcaaccaaaatgcacaagctttaaacacgcttgttaaacaacttagctccaattttggtgcaatttcaagtgttttaaatgatatccttgcacgtcttgacaaagttgaggctgaagtgcaaattgataggttgatcacaggcagacttcaaagtttgcagacatatgtgactcaacaattaattagagctgcagaaatcagagcttctgctaatcttgctgctactaaaatgtcagagtgtgtacttggacaatcaaaaagagttgatttttgtggaaagggctatcatcttatgtccttccctcagtcagcacctcatggtgtagtcttcttgcatgtgacttatgtccctgcacaagaaaagaacttcacaactgctcctgccatttgtcatgatggaaaagcacactttcctcgtgaaggtgtctttgtttcaaatggcacacactggtttgtaacacaaaggaatttttatgaaccacaaatcattactacacacaacacatttgtgtctggtaactgtgatgttgtaataggaattgtcaacaacacagtttatgatcctttgcaacctgaattagactcattcaaggaggagttagataaatattttaagaatcatacatcaccagatgttgatttaggtgacatctctggcattaatgcttcagttgtaaacattcaaaaagaaattgaccgcctcaatgaggttgccaagaatttaaatgaatctctcatcgatctccaagaacttggaaagtatgagcagtatataaaatggccatggtacatttggctaggttttatagctggcttgattgccatagtaatggtgacaattatgctttgctgtatgaccagttgctgtagttgtctcaagggctgttgttcttgtggatcctgctgcaaatttgatgaagacgactctgagccagtgctcaaaggagtcaaattacattacacataa

SEQ ID NO: 304 - DNA, 828 bp, Severe acute respiratory syndrome coronavirus 2
  source 1..828: mol_type = unassigned DNA
atggatttgtttatgagaatcttcacaattggaactgtaactttgaagcaaggtgaaatcaaggatgctactccttcagattttgttcgcgctactgcaacgataccgatacaagcctcactccctttcggatggcttattgttggcgttgcacttcttgctgtttttcagagcgcttccaaaatcataaccctcaaaaagagatggcaactagcactctccaagggtgttcactttgtttgcaacttgctgttgttgtttgtaacagtttactcacaccttttgctcgttgctgctggccttgaagccccttttctctatctttatgctttagtctacttcttgcagagtataaactttgtaagaataataatgaggctttggctttgctggaaatgccgttccaaaaacccattactttatgatgccaactattttctttgctggcatactaattgttacgactattgtataccttacaatagtgtaacttcttcaattgtcattacttcaggtgatggcacaacaagtcctatttctgaacatgactaccagattggtggttatactgaaaaatgggaatctggagtaaaagactgtgttgtattacacagttacttcacttcagactattaccagctgtactcaactcaattgagtacagacactggtgttgaacatgttaccttcttcatctacaataaaattgttgatgagcctgaagaacatgtccaaattcacacaatcgacggttcatccggagttgttaatccagtaatggaaccaatttatgatgaaccgacgacgactactagcgtgcctttgtaa

SEQ ID NO: 305 - DNA, 228 bp, Severe acute respiratory syndrome coronavirus 2
  source 1..228: mol_type = unassigned DNA
atgtactcattcgtttcggaagagacaggtacgttaatagttaatagcgtacttctttttcttgctttcgtggtattcttgctagttacactagccatccttactgcgcttcgattgtgtgcgtactgctgcaatattgttaacgtgagtcttgtaaaaccttctttttacgtttactctcgtgttaaaaatctgaattcttctagagttcctgatcttctggtctaa

SEQ ID NO: 306 - DNA, 669 bp, Severe acute respiratory syndrome coronavirus 2
  source 1..669: mol_type = unassigned DNA
atggcagattccaacggtactattaccgttgaagagcttaaaaagctccttgaacaatggaacctagtaataggtttcctattccttacatggatttgtcttctacaatttgcctatgccaacaggaataggtttttgtatataattaagttaattttcctctggctgttatggccagtaactttagcttgttttgtgcttgctgctgtttacagaataaattggatcaccggtggaattgctatcgcaatggcttgtcttgtaggcttgatgtggctcagctacttcattgcttctttcagactgtttgcgcgtacgcgttccatgtggtcattcaatccagaaactaacattcttctcaacgtgccactccatggcactattctgaccagaccgcttctagaaagtgaactcgtaatcggagctgtgatccttcgtggacatcttcgtattgctggacaccatctaggacgctgtgacatcaaggacctgcctaaagaaatcactgttgctacatcacgaacgctttcttattacaaattgggagcttcgcagcgtgtagcaggtgactcaggttttgctgcatacagtcgctacaggattggcaactataaattaaacacagaccattccagtagcagtgacaatattgctttgcttgtacagtaa

SEQ ID NO: 307 - DNA, 186 bp, Severe acute respiratory syndrome coronavirus 2
  source 1..186: mol_type = unassigned DNA
atgtttcatctcgttgactttcaggttactatagcagagatattactaattattatgaggacttttaaagtttccatttggaatcttgattacatcataaacctcataattaaaaatttatctaagtcactaactgagaataaatattctcaattagatgaagagcaaccaatggagattgattaa

SEQ ID NO: 308 - DNA, 366 bp, Severe acute respiratory syndrome coronavirus 2
  source 1..366: mol_type = unassigned DNA
atgaaaattattcttttcttggcactgataacactcgctacttgtgagctttatcactaccaagagtgtgttagaggtacaacagtacttttaaaagaaccttgctcttctggaacatacgagggcaattcaccatttcatcctctagctgataacaaatttgcactgacttgctttagcactcaatttgcttttgcttgtcctgacggcgtaaaacacgtctatcagttacgtgccagatcagtttcacctaaactgttcatcagacaagaggaagttcaagaactttactctccaatttttcttattgttgcggcaatagtgtttataacactttgcttcacactcaaaagaaagacagaatga

SEQ ID NO: 309 - DNA, 132 bp, Severe acute respiratory syndrome coronavirus 2
  source 1..132: mol_type = unassigned DNA
atgattgaactttcattaattgacttctatttgtgctttttagcctttctgctattccttgttttaattatgcttattatcttttggttctcacttgaactgcaagatcataatgaaacttgtcacgcctaa

SEQ ID NO: 310 - DNA, 81 bp, Severe acute respiratory syndrome coronavirus 2
  source 1..81: mol_type = unassigned DNA
atgaaatttcttgttttcttaggaatcatcacaactgtagctgcatttcaccaagaatgtagtttacagtcatgtacttaa

SEQ ID NO: 311 - DNA, 1260 bp, Severe acute respiratory syndrome coronavirus 2
  source 1..1260: mol_type = unassigned DNA
atgtctctaaatggaccccaaaatcagcgaaatgcaccccgcattacgtttggtggaccctcagattcaactggcagtaaccagaatggagaacgcagtggggcgcgatcaaaacaacgtcggccccaaggtttacccaataatactgcgtcttggttcaccgctctcactcaacatggcaaggaagaccttaaattccctcgaggacaaggcgttccaattaacaccaatagcagtccagatgaccaaattggctactaccgaagagctaccagacgaattcgtggtggtgacggtaaaatgaaagatctcagtccaagatggtatttctactacctaggaactgggccagaagctggacttccctatggtgctaacaaagacggcatcatatgggttgcaactgagggagccttgaatacaccaaaagatcacattggcacccgcaatcctgctaacaatgctgcaatcgtgctacaacttcctcaaggaacaacattgccaaaaggcttctacgcagaagggagcagaggcggcagtcaagcctcttctcgttcctcatcacgtagtcgcaacagttcaagaaattcaactccaggcagcagtaaacgaacttctcctgctagaatggctggcaatggcggtgatgcggctcttgctttgctgctgcttgacagattgaaccagcttgagagcaaaatgtttggtaaaggccaacaacaacaaggccaaactgtcactaagaaatctgctgctgaggcttctaagaagcctcggcaaaaacgtactgccactaaagcatacaatgtaacacaagctttcggcagacgtggtccagaacaaacccaaggaaattttggggaccaggaactaatcagacaaggaactgattacaaacattggccgcaaattgcacaatttgcccccagcgcttcagcgttcttcggaatgtcgcgcattggcatggaagtcacaccttcgggaacgtggttgacctacacaggtgccatcaaattggatgacaaagatccaaatttcaaagatcaagtcattttgctgaataagcatattgacgcatacaaaacattcccaccaacagagcctaaaaaggacaaaaagaagaaggctgatgaaactcaagccttaccgcagagacagaagaaacagcaaactgtgactcttcttcctgctgcagatttggatgatttctccaaacaattgcaacaatccatgagcagtgctgactcaactcaggcctaa

SEQ ID NO: 312 - DNA, 117 bp, Severe acute respiratory syndrome coronavirus 2
  source 1..117: mol_type = unassigned DNA
atgggctatataaacgttttcgcttttccgtttacgatatatagtctactcttgtgcagaatgaattctcgtaactacatagcacaagtagatgtagttaactttaatctcacatag

SEQ ID NO: 313 - DNA, 21291 bp, Severe acute respiratory syndrome coronavirus 2
  source 1..21291: mol_type = unassigned DNA
atggagagccttgtccctggtttcaacgagaaaacacacgtccaactcagtttgcctgttttacaggttcgcgacgtgctcgtacgtggctttggagactccgtggaggaggtcttatcagaggcacgtcaacatcttaaagatggcacttgtggcttagtagaagttgaaaaaggcgttttgcctcaacttgaacagccctatgtgttcatcaaacgttcggatgctcgaactgcacctcatggtcatgttatggttgagctggtagcagaactcgaaggcattcagtacggtcgtagtggtgagacacttggtgtccttgtccctcatgtgggcgaaataccagtggcttaccgcaaggttcttcttcgtaagaacggtaataaaggagctggtggccatagttacggcgccgatctaaagtcatttgacttaggcgacgagcttggcactgatccttatgaagattttcaagaaaactggaacactaaacatagcagtggtgttacccgtgaactcatgcgtgagcttaacggaggggcatacactcgctatgtcgataacaacttctgtggccctgatggctaccctcttgagtgcattaaagaccttctagcacgtgctggtaaagcttcatgcactttgtccgaacaactggactttattgacactaagaggggtgtatactgctgccgtgaacatgagcatgaaattgcttggtacacggaacgttctgaaaagagctatgaattgcagacaccttttgaaattaaattggcaaagaaatttgacaccttcaatggggaatgtccaaattttgtatttcccttaaattccataatcaagactattcaaccaagggttgaaaagaaaaagcttgatggctttatgggtagaattcgatctgtctatccagttgcgtcaccaaatgaatgcaaccaaatgtgcctttcaactctcatgaagtgtgatcattgtggtgaaacttcatggcagacgggcgattttgttaaagccacttgcgaattttgtggcactgagaatttgactaaagaaggtgccactacttgtggttacttaccccaaaatgctgttgttaaaatttattgtccagcatgtcacaattcagaagtaggacctgagcatagtcttgccgaataccataatgaatctggcttgaaaaccattcttcgtaagggtggtcgcactattgcctttggaggctgtgtgttctcttatgttggttgccataacaagtgtgcctattgggttccacgtgctagcgctaacataggttgtaaccatacaggtgttgttggagaaggttccgaaggtcttaatgacaaccttcttgaaatactccaaaaagagaaagtcaacatcaatattgttggtgactttaaacttaatgaagagatcgccattattttggcatctttttctgcttccacaagtgcttttgtggaaactgtgaaaggtttggattataaagcattcaaacaaattgttgaatcctgtggtaattttaaagttacaaaaggaaaagctaaaaaaggtgcctggaatattggtgaacagaaatcaatactgagtcctctttatgcatttgcatcagaggctgctcgtgttgtacgatcaattttctcccgcactcttgaaactgctcaaaattctgtgcgtgttttacagaaggccgctataacaatactagatggaatttcacagtattcactgagactcattgatgctatgatgttcacatctgatttggctactaacaatctagttgtaatggcctacattacaggtggtgttgttcagttgacttcgcagtggctaactaacatctttggcactgtttatgaaaaactcaaacccgtccttgattggcttgaagagaagtttaaggaaggtgtagagtttcttagagacggttgggaaattgttaaatttatctcaacctgtgcttgtgaaattgtcggtggacaaattgtcacctgtgcaaaggaaattaaggagagtgttcagacattctttaagcttgtaaataaatttttggctttgtgtgctgactctatcattattggtggagctaaacttaaagccttgaatttaggtgaaacatttgtcacgcactcaaagggattgtacagaaagtgtgttaaatccagagaagaaactggcctactcatgcctctaaaagccccaaaagaaattatcttcttagagggagaaacacttcccacagaagtgttaacagaggaagttgtcttgaaaactggtgatttacaaccattagaacaacctactagtgaagctgttgaagctccattggttggtacaccagtttgtattaacgggcttatgttgctcgaaatcaaagacacagaaaagtactgtgcccttgcacctaatatgatggtaacaaacaataccttcacactcaaaggcggtgcaccaacaaaggttacttttggtgatgacactgtgatagaagtgcaaggttacaagagtgtgaatatcacttttgaacttgatgaaaggattgataaagtacttaatgagaagtgctctgcctatacagttgaactcggtacagaagtaaatgagttcgcctgtgttgtggcagatgctgtcataaaaactttgcaaccagtatctgaattacttacaccactgggcattgatttagatgagtggagtatggctacatactacttatttgatgagtctggtgagtttaaattggcttcacatatgtattgttctttttaccctccagatgaggatgaagaagaaggtgattgtgaagaagaagagtttgagccatcaactcaatatgagtatggtactgaagatgattaccaaggtaaacctttggaatttggtgccacttctgctgctcttcaacctgaagaagagcaagaagaagattggttagatgatgatagtcaacaaactgttggtcaacaagacggcagtgaggacaatcagacaactactattcaaacaattgttgaggttcaacctcaattagagatggaacttacaccagttgttcagactattgaagtgaatagttttagtggttatttaaaacttactgacaatgtatacattaaaaatgcagacattgtggaagaagctaaaaaggtaaaaccaacagtggttgttaatgcagccaatgtttaccttaaacatggaggaggtgttgcaggagccttaaataaggctactaacaatgccatgcaagttgaatctgatgattacatagctactaatggaccacttaaagtgggtggtagttgtgttttaagcggacacaatcttgctaaacactgtcttcatgttgtcggcccaaatgttaacaaaggtgaagacattcaacttcttaagagtgcttatgaaaattttaatcagcacgaagttctacttgcaccattattatcagctggtatttttggtgctgaccctatacattctttaagagtttgtgtagatactgttcgcacaaatgtctacttagctgtctttgataaaaatctctatgacaaacttgtttcaagctttttggaaatgaagagtgaaaagcaagttgaacaaaagatcgctgagattcctaaagaggaagttaagccatttataactgaaagtaaaccttcagttgaacagagaaaacaagatgataagaaaatcaaagcttgtgttgaagaagttacaacaactctggaagaaactaagttcctcacagaaaacttgttactttatattgacattaatggcaatcttcatccagattctgccactcttgttagtgacattgacatcactttcttaaagaaagatgctccatatatagtgggtgatgttgttcaagagggtgttttaactgctgtggttatacctactaaaaaggctggtggcactactgaaatgctagcgaaagctttgagaaaagtgccaacagacaattatataaccacttacccgggtcagggtttaaatggttacactgtagaggaggcaaagacagtgcttaaaaagtgtaaaagtgccttttacattctaccatctattatctctaatgagaagcaagaaattcttggaactgtttcttggaatttgcgagaaatgcttgcacatgcagaagaaacacgcaaattaatgcctgtctgtgtggaaactaaagccatagtttcaactatacagcgtaaatataagggtattaaaatacaagagggtgtggttgattatggtgctagattttacttttacaccagtaaaacaactgtagcgtcacttatcaacacacttaacgatctaaatgaaactcttgttacaatgccacttggctatgtaacacatggcttaaatttggaagaagctgctcggtatatgagatctctcaaagtgccagctacagtttctgtttcttcacctgatgctgttacagcgtataatggttatcttacttcttcttctaaaacacctgaagaacattttattgaaaccatctcacttgctggttcctataaagattggtcctattctggacaatctacacaactaggtatagaatttcttaagagaggtgataaaagtgtatattacactagtaatcctaccacattccacctagatggtgaagttatcacctttgacaatcttaagacacttctttctttgagagaagtgaggactattaaggtgtttacaacagtagacaacattaacctccacacgcaagttgtggacatgtcaatgacatatggacaacagtttggtccaacttatttggatggagctgatgttactaaaataaaacctcataattcacatgaaggtaaaacattttatgttttacctaatgatgacactctacgtgttgaggcttttgagtactaccacacaactgatcctagttttctgggtaggtacatgtcagcattaaatcacactaaaaagtggaaatacccacaagttaatggtttaacttctattaaatgggcagataacaactgttatcttgccactgcattgttaacactccaacaaatagagttgaagtttaatccacctgctctacaagatgcttattacagagcaagggctggtgaagctgctaacttttgtgcacttatcttagcctactgtaataagacagtaggtgagttaggtgatgttagagaaacaatgagttacttgtttcaacatgccaatttagattcttgcaaaagagtcttgaacgtggtgtgtaaaacttgtggacaacagcagacaacccttaagggtgtagaagctgttatgtacatgggcacactttcttatgaacaatttaagaaaggtgttcagataccttgtacgtgtggtaaacaagctacaaaatatctagtacaacaggagtcaccttttgttatgatgtcagcaccacctgctcagtatgaacttaagcatggtacatttacttgtgctagtgagtacactggtaattaccagtgtggtcactataaacatataacttctaaagaaactttgtattgcatagacggtgctttacttacaaagtcctcagaatacaaaggtcctattacggatgttttctacaaagaaaacagttacacaacaaccataaaaccagttacttataaattggatggtgttgtttgtacagaaattgaccctaagttggacaattattataagaaagacaattcttatttcacagagcaaccaattgatcttgtaccaaaccaaccatatccaaacgcaagcttcgataattttaagtttgtatgtgataatatcaaatttgctgatgatttaaaccagttaactggttataagaaacctgcttcaagagagcttaaagttacatttttccctgacttaaatggtgatgtggtggctattgattataaacactacacaccctcttttaagaaaggagctaaattgttacataaacctattgtttggcatgttaacaatgcaactaataaagccacgtataaaccaaatacctggtgtatacgttgtctttggagcacaaaaccagttgaaacatcaaattcgtttgatgtactgaagtcagaggacgcgcagggaatggataatcttgcctgcgaagatctaaaaccagtctctgaagaagtagtggaaaatcctaccatacagaaagacgttcttgagtgtaatgtgaaaactaccgaagttgtaggagacattatacttaaaccagcaaataatagtttaaaaattacagaagaggttggccacacagatctaatggctgcttatgtagacaattctagtcttactattaagaaacctaatgaattatctagagtattaggtttgaaaacccttgctactcatggtttagctgctgttaatagtgtcccttgggatactatagctaattatgctaagccttttcttaacaaagttgttagtacaactactaacatagttacacggtgtttaaaccgtgtttgtactaattatatgccttatttctttactttattgctacaattgtgtacttttactagaagtacaaattctagaattaaagcatctatgccgactactatagcaaagaatactgttaagagtgtcggtaaattttgtctagaggcttcatttaattatttgaagtcacctaatttttctaaactgataaatattataatttggtttttactattaagtgtttgcctaggttctttaatctactcaaccgctgctttaggtgttttaatgtctaatttaggcatgccttcttactgtactggttacagagaaggctatttgaactctactaatgtcactattgcaacctactgtactggttctataccttgtagtgtttgtcttagtggtttagattctttagacacctatccttctttagaaactatacaaattaccatttcatcttttaaatgggatttaactgcttttggcttagttgcagagtggtttttggcatatattcttttcactaggtttttctatgtacttggattggctgcaatcatgcaattgtttttcagctattttgcagtacattttattagtaattcttggcttatgtggttaataattaatcttgtacaaatggccccgatttcagctatggttagaatgtacatcttctttgcatcattttattatgtatggaaaagttatgtgcatgttgtagacggttgtaattcatcaacttgtatgatgtgttacaaacgtaatagagcaacaagagtcgaatgtacaactattgttaatggtgttagaaggtccttttatgtctatgctaatggaggtaaaggcttttgcaaactacacaattggaattgtgttaattgtgatacattctgtgctggtagtacatttattagtgatgaagttgcgagagacttgtcactacagtttaaaagaccaataaatcctactgaccagtcttcttacatcgttgatagtgttacagtgaagaatggttccatccatctttactttgataaagctggtcaaaagacttatgaaagacattctctctctcattttgttaacttagacaacctgagagctaataacactaaaggttcattgcctattaatgttatagtttttgatggtaaatcaaaatgtgaagaatcatctgcaaaatcagcgtctgtttactacagtcagcttatgtgtcaacctatactgttactagatcaggcattagtgtctgatgttggtgatagtgcggaagttgcagttaaaatgtttgatgcttacgttaatacgttttcatcaacttttaacgtaccaatggaaaaactcaaaacactagttgcaactgcagaagctgaacttgcaaagaatgtgtccttagacaatgtcttatctacttttatttcagcagctcggcaagggtttgttgattcagatgtagaaactaaagatgttgttgaatgtcttaaattgtcacatcaatctgacatagaagttactggcgatagttgtaataactatatgctcacctataacaaagttgaaaacatgacaccccgtgaccttggtgcttgtattgactgtagtgcgcgtcatattaatgcgcaggtagcaaaaagtcacaacattgctttgatatggaacgttaaagatttcatgtcattgtctgaacaactacgaaaacaaatacgtagtgctgctaaaaagaataacttaccttttaagttgacatgtgcaactactagacaagttgttaatgttgtaacaacaaagatagcacttaagggtggtaaaattgttaataattggttgaagcagttaattaaagttacacttgtgttcctttttgttgctgctattttctatttaataacacctgttcatgtcatgtctaaacatactgacttttcaagtgaaatcataggatacaaggctattgatggtggtgtcactcgtgacatagcatctacagatacttgttttgctaacaaacatgctgattttgacacatggtttagccagcgtggtggtagttatactaatgacaaagcttgcccattgattgctgcagtcataacaagagaagtgggttttgtcgtgcctggtttgcctggcacgatattacgcacaactaatggtgactttttgcatttcttacctagagtttttagtgcagttggtaacatctgttacacaccatcaaaacttatagagtacactgactttgcaacatcagcttgtgttttggctgctgaatgtacaatttttaaagatgcttctggtaagccagtaccatattgttatgataccaatgtactagaaggttctgttgcttatgaaagtttacgccctgacacacgttatgtgctcatggatggctctattattcaatttcctaacacctaccttgaaggttctgttagagtggtaacaacttttgattctgagtactgtaggcacggcacttgtgaaagatcagaagctggtgtttgtgtatctactagtggtagatgggtacttaacaatgattattacagatctttaccaggagttttctgtggtgtagatgctgtaaatttacttactaatatgtttacaccactaattcaacctattggtgctttggacatatcagcatctatagtagctggtggtattgtagctatcgtagtaacatgccttgcctactattttatgaggtttagaagagcttttggtgaatacagtcatgtagttgcctttaatactttactattccttatgtcattcactgtactctgtttaacaccagtttactcattcttacctggtgtttattctgttatttacttgtacttgacattttatcttactaatgatgtttcttttttagcacatattcagtggatggttatgttcacacctttagtacctttctggataacaattgcttatatcatttgtatttccacaaagcatttctattggttctttagtaattacctaaagagacgtgtagtctttaatggtgtttcctttagtacttttgaagaagctgcgctgtgcacctttttgttaaataaagaaatgtatctaaagttgcgtagtgatgtgctattacctcttacgcaatataatagatacttagctctttataataagtacaagtattttagtggagcaatggatacaactagctacagagaagctgcttgttgtcatctcgcaaaggctctcaatgacttcagtaactcaggttctgatgttctttaccaaccaccacaaacctctatcacctcagctgttttgcagagtggttttagaaaaatggcattcccatctggtaaagttgagggttgtatggtacaagtaacttgtggtacaactacacttaacggtctttggcttgatgacgtagtttactgtccaagacatgtgatctgcacctctgaagacatgcttaaccctaattatgaagatttactcattcgtaagtctaatcataatttcttggtacaggctggtaatgttcaactcagggttattggacattctatgcaaaattgtgtacttaagcttaaggttgatacagccaatcctaagacacctaagtataagtttgttcgcattcaaccaggacagactttttcagtgttagcttgttacaatggttcaccatctggtgtttaccaatgtgctatgaggcccaatttcactattaagggttcattccttaatggttcatgtggtagtgttggttttaacatagattatgactgtgtctctttttgttacatgcaccatatggaattaccaactggagttcatgctggcacagacttagaaggtaacttttatggaccttttgttgacaggcaaacagcacaagcagctggtacggacacaactattacagttaatgttttagcttggttgtacgctgctgttataaatggagacaggtggtttctcaatcgatttaccacaactcttaatgactttaaccttgtggctatgaagtacaattatgaacctctaacacaagaccatgttgacatactaggacctctttctgctcaaactggaattgccgttttagatatgtgtgcttcattaaaagaattactgcaaaatggtatgaatggacgtaccatattgggtagtgctttattagaagatgaatttacaccttttgatgttgttagacaatgctcaggtgttactttccaaagtgcagtgaaaagaacaatcaagggtacacaccactggttgttactcacaattttgacttcacttttagttttagtccagagtactcaatggtctttgttcttttttttgtatgaaaatgcctttttaccttttgctatgggtattattgctatgtctgcttttgcaatgatgtttgtcaaacataagcatgcatttctctgtttgtttttgttaccttctcttgccactgtagcttattttaatatggtctatatgcctgctagttgggtgatgcgtattatgacatggttggatatggttgatactagtttgtctggttttaagctaaaagactgtgttatgtatgcatcagctgtagtgttactaatccttatgacagcaagaactgtgtatgatgatggtgctaggagagtgtggacacttatgaatgtcttgacactcgtttataaagtttattatggtaatgctttagatcaagccatttccatgtgggctcttataatctctgttacttctaactactcaggtgtagttacaactgtcatgtttttggccagaggtattgtttttatgtgtgttgagtattgccctattttcttcataactggtaatacacttcagtgtataatgctagtttattgtttcttaggctatttttgtacttgttactttggcctcttttgtttactcaaccgctactttagactgactcttggtgtttatgattacttagtttctacacaggagtttagatatatgaattcacagggactactcccacccaagaatagcatagatgccttcaaactcaacattaaattgttgggtgttggtggcaaaccttgtatcaaagtagccactgtacagtctaaaatgtcagatgtaaagtgcacatcagtagtcttactctcagttttgcaacaactcagagtagaatcatcatctaaattgtgggctcaatgtgtccagttacacaatgacattctcttagctaaagatactactgaagcctttgaaaaaatggtttcactactttctgttttgctttccatgcagggtgctgtagacataaacaagctttgtgaagaaatgctggacaacagggcaaccttacaagctatagcctcagagtttagttcccttccatcatatgcagcttttgctactgctcaagaagcttatgagcaggctgttgctaatggtgattctgaagttgttcttaaaaagttgaagaagtctttgaatgtggctaaatctgaatttgaccgtgatgcagccatgcaacgtaagttggaaaagatggctgatcaagctatgacccaaatgtataaacaggctagatctgaggacaagagggcaaaagttactagtgctatgcagacaatgcttttcactatgcttagaaagttggataatgatgcactcaacaacattatcaacaatgcaagagatggttgtgttcccttgaacataatacctcttacaacagcagccaaactaatggttgtcataccagactataacacatataaaaatacgtgtgatggtacaacatttacttatgcatcagcattgtgggaaatccaacaggttgtagatgcagatagtaaaattgttcaacttagtgaaattagtatggacaattcacctaatttagcatggcctcttattgtaacagctttaagggccaattctgctgtcaaattacagaataatgagcttagtcctgttgcactacgacagatgtcttgtgctgccggtactacacaaactgcttgcactgatgacaatgcgttagcttactacaacacaacaaagggaggtaggtttgtacttgcactgttatccgatttacaggatttgaaatgggctagattccctaagagtgatggaactggtactatctatacagaactggaaccaccttgtaggtttgttacagacacacctaaaggtcctaaagtgaagtatttatactttattaaaggattaaacaacctaaatagaggtatggtacttggtagtttagctgccacagtacgtctacaagctggtaatgcaacagaagtgcctgccaattcaactgtattatctttctgtgcttttgctgtagatgctgctaaagcttacaaagattatctagctagtgggggacaaccaatcactaattgtgttaagatgttgtgtacacacactggtactggtcaggcaataacagttacaccggaagccaatatggatcaagaatcctttggtggtgcatcgtgttgtctgtactgccgttgccacatagatcatccaaatcctaaaggattttgtgacttaaaaggtaagtatgtacaaatacctacaacttgtgctaatgaccctgtgggttttacacttaaaaacacagtctgtaccgtctgcggtatgtggaaaggttatggctgtagttgtgatcaactccgcgaacccatgcttcagtcagctgatgcacaatcgtttttaaaccgggtttgcggtgtaagtgcagcccgtcttacaccgtgcggcacaggcactagtactgatgtcgtatacagggcttttgacatctacaatgataaagtagctggttttgctaaattcctaaaaactaattgttgtcgcttccaagaaaaggatgaagatgacaatttaattgattcttactttgtagttaagagacacactttctctaactaccaacatgaagaaacaatttataatttacttaaggattgtccagctgttgctaaacatgacttctttaagtttagaatagacggtgacatggtaccacatatatcacgtcaacgtcttactaaatacacaatggcagacctcgtctatgctttaaggcattttgatgaaggtaattgtgacacattaaaagaaatacttgtcacatacaattgttgtgatgatgattatttcaataaaaaggactggtatgattttgtagaaaacccagatatattacgcgtatacgccaacttaggtgaacgtgtacgccaagctttgttaaaaacagtacaattctgtgatgccatgcgaaatgctggtattgttggtgtactgacattagataatcaagatctcaatggtaactggtatgatttcggtgatttcatacaaaccacgccaggtagtggagttcctgttgtagattcttattattcattgttaatgcctatattaaccttgaccagggctttaactgcagagtcacatgttgacactgacttaacaaagccttacattaagtgggatttgttaaaatatgacttcacggaagagaggttaaaactctttgaccgttattttaaatattgggatcagacataccacccaaattgtgttaactgtttggatgacagatgcattctgcattgtgcaaactttaatgttttattctctacagtgttcccacttacaagttttggaccactagtgagaaaaatatttgttgatggtgttccatttgtagtttcaactggataccacttcagagagctaggtgttgtacataatcaggatgtaaacttacatagctctagacttagttttaaggaattacttgtgtatgctgctgaccctgctatgcacgctgcttctggtaatctattactagataaacgcactacgtgcttttcagtagctgcacttactaacaatgttgcttttcaaactgtcaaacccggtaattttaacaaagacttctatgactttgctgtgtctaagggtttctttaaggaaggaagttctgttgaattaaaacacttcttctttgctcaggatggtaatgctgctatcagcgattatgactactatcgttataatctaccaacaatgtgtgatatcagacaactactatttgtagttgaagttgttgataagtactttgattgttacgatggtggctgtattaatgctaaccaagtcatcgtcaacaacctagacaaatcagctggttttccatttaataaatggggtaaggctagactttattatgattcaatgagttatgaggatcaagatgcacttttcgcatatacaaaacgtaatgtcatccctactataactcaaatgaatcttaagtatgccattagtgcaaagaatagagctcgcaccgtagctggtgtctctatctgtagtactatgaccaatagacagtttcatcaaaaattattgaaatcaatagccgccactagaggagctactgtagtaattggaacaagcaaattctatggtggttggcacaacatgttaaaaactgtttatagtgatgtagaaaaccctcaccttatgggttgggattatcctaaatgtgatagagccatgcctaacatgcttagaattatggcctcacttgttcttgctcgcaaacatacaacgtgttgtagcttgtcacaccgtttctatagattagctaatgagtgtgctcaagtattgagtgaaatggtcatgtgtggcggttcactatatgttaaaccaggtggaacctcatcaggagatgccacaactgcttatgctaatagtgtttttaacatttgtcaagctgtcacggccaatgttaatgcacttttatctactgatggtaacaaaattgccgataagtatgtccgcaatttacaacacagactttatgagtgtctctatagaaatagagatgttgacacagactttgtgaatgagttttacgcatatttgcgtaaacatttctcaatgatgatactctctgacgatgctgttgtgtgtttcaatagcacttatgcatctcaaggtctagtggctagcataaagaactttaagtcagttctttattatcaaaacaatgtttttatgtctgaagcaaaatgttggactgagactgaccttactaaaggacctcatgaattttgctctcaacatacaatgctagttaaacagggtgatgattatgtgtaccttccttacccagatccatcaagaatcctaggggccggctgttttgtagatgatatcgtaaaaacagatggtacacttatgattgaacggttcgtgtctttagctatagatgcttacccacttactaaacatcctaatcaggagtatgctgatgtctttcatttgtacttacaatacataagaaagctacatgatgagttaacaggacacatgttagacatgtattctgttatgcttactaatgataacacttcaaggtattgggaacctgagttttatgaggctatgtacacaccgcatacagtcttacaggctgttggggcttgtgttctttgcaattcacagacttcattaagatgtggtgcttgcatacgtagaccattcttatgttgtaaatgctgttacgaccatgtcatatcaacatcacataaattagtcttgtctgttaatccgtatgtttgcaatgctccaggttgtgatgtcacagatgtgactcaactttacttaggaggtatgagctattattgtaaatcacataaaccacccattagttttccattgtgtgctaatggacaagtttttggtttatataaaaatacatgtgttggtagcgataatgttactgactttaatgcaattgcaacatgtgactggacaaatgctggtgattacattttagctaacacctgtactgaaagactcaagctttttgcagcagaaacgctcaaagctactgaggagacatttaaactgtcttatggtattgctactgtacgtgaagtgctgtctgacagagaattacatctttcatgggaagttggtaaacctagaccaccacttaaccgaaattatgtctttactggttatcgtgtaactaaaaacagtaaagtacaaataggagagtacacctttgaaaaaggtgactatggtgatgctgttgtttaccgaggtacaacaacttacaaattaaatgttggtgattattttgtgctgacatcacatacagtaatgccattaagtgcacctacactagtgccacaagagcactatgttagaattactggcttatacccaacactcaatatctcagatgagttttctagcaatgttgcaaattatcaaaaggttggtatgcaaaagtattctacactccagggaccacctggtactggtaagagtcattttgctattggcctagctctctactacccttctgctcgcatagtgtatacagcttgctctcatgccgctgttgatgcactatgtgagaaggcattaaaatatttgcctatagataaatgtagtagaattatacctgcacgtgctcgtgtagagtgttttgataaattcaaagtgaattcaacattagaacagtatgtcttttgtactgtaaatgcattgcctgagacgacagcagatatagttgtctttgatgaaatttcaatggccacaaattatgatttgagtgttgtcaatgccagattacgtgctaagcactatgtgtacattggcgaccctgctcaattacctgcaccacgcacattgctaactaagggcacactagaaccagaatatttcaattcagtgtgtagacttatgaaaactataggtccagacatgttcctcggaacttgtcggcgttgtcctgctgaaattgttgacactgtgagtgctttggtttatgataataagcttaaagcacataaagacaaatcagctcaatgctttaaaatgttttataagggtgttatcacgcatgatgtttcatctgcaattaacaggccacaaataggcgtggtaagagaattccttacacgtaaccctgcttggagaaaagctgtctttatttcaccttataattcacagaatgctgtagcctcaaagattttgggactaccaactcaaactgttgattcatcacagggctcagaatatgactatgtcatattcactcaaaccactgaaacagctcactcttgtaatgtaaacagatttaatgttgctattaccagagcaaaagtaggcatactttgcataatgtctgatagagacctttatgacaagttgcaatttacaagtcttgaaattccacgtaggaatgtggcaactttacaagctgaaaatgtaacaggactctttaaagattgtagtaaggtaatcactgggttacatcctacacaggcacctacacacctcagtgttgacactaaattcaaaactgaaggtttatgtgttgacatacctggcatacctaaggacatgacctatagaagactcatctctatgatgggttttaaaatgaattatcaagttaatggttaccctaacatgtttatcacccgcgaagaagctataagacatgtacgtgcatggattggcttcgatgtcgaggggtgtcatgctactagagaagctgttggtaccaatttacctttacagctaggtttttctacaggtgttaacctagttgctgtacctacaggttatgttgatacacctaataatacagatttttccagagttagtgctaaaccaccgcctggagatcaatttaaacacctcataccacttatgtacaaaggacttccttggaatgtagtgcgtataaagattgtacaaatgttaagtgacacacttaaaaatctctctgacagagtcgtatttgtcttatgggcacatggctttgagttgacatctatgaagtattttgtgaaaataggacctgagcgcacctgttgtctatgtgatagacgtgccacatgcttttccactgcttcagacacttatgcctgttggcatcattctattggatttgattacgtctataatccgtttatgattgatgttcaacaatggggttttacaggtaacctacaaagcaaccatgatctgtattgtcaagtccatggtaatgcacatgtagctagttgtgatgcaatcatgactaggtgtctagctgtccacgagtgctttgttaagcgtgttgactggactattgaatatcctataattggtgatgaactgaagattaatgcggcttgtagaaaggttcaacacatggttgttaaagctgcattattagcagacaaattcccagttcttcacgacattggtaaccctaaagctattaagtgtgtacctcaagctgatgtagaatggaagttctatgatgcacagccttgtagtgacaaagcttataaaatagaagaattattctattcttatgccacacattctgacaaattcacagatggtgtatgcctattttggaattgcaatgtcgatagatatcctgctaattccattgtttgtagatttgacactagagtgctatctaaccttaacttgcctggttgtgatggtggcagtttgtatgtaaataaacatgcattccacacaccagcttttgataaaagtgcttttgttaatttaaaacaattaccatttttctattactctgacagtccatgtgagtctcatggaaaacaagtagtgtcagatatagattatgtaccactaaagtctgctacgtgtataacacgttgcaatttaggtggtgctgtctgtagacatcatgctaatgagtacagattgtatctcgatgcttataacatgatgatctcagctggctttagcttgtgggtttacaaacaatttgatacttataacctctggaacacttttacaagacttcagagtttagaaaatgtggcttttaatgttgtaaataagggacactttgatggacaacagggtgaagtaccagtttctatcattaataacactgtttacacaaaagttgatggtgttgatgtagaattgtttgaaaataaaacaacattacctgttaatgtagcatttgagctttgggctaagcgcaacattaaaccagtaccagaggtgaaaatactcaataatttgggtgtggacattgctgctaatactgtgatctgggactacaaaagagatgctccagcacatatatctactattggtgtttgttctatgactgacatagccaagaaaccaactgaaacgatttgtgcaccactcactgtcttttttgatggtagagttgatggtcaagtagacttatttagaaatgcccgtaatggtgttcttattacagaaggtagtgttaaaggtttacaaccatctgtaggtcccaaacaagctagtcttaatggagtcacattaattggagaagccgtaaaaacacagttcaattattataagaaagttgatggtgttgtccaacaattacctgaaacttactttactcagagtagaaatttacaagaatttaaacccaggagtcaaatggaaattgatttcttagaattagctatggatgaattcattgaacggtataaattagaaggctatgccttcgaacatatcgtttatggagattttagtcatagtcagttaggtggtttacatctactgattggactagctaaacgttttaaggaatcaccttttgaattagaagattttattcctatggacagtacagttaaaaactatttcataacagatgcgcaaacaggttcatctaagtgtgtgtgttctgttattgatttattacttgatgattttgttgaaataataaaatcccaagatttatctgtagtttctaaggttgtcaaagtgactattgactatacagaaatttcatttatgctttggtgtaaagatggccatgtagaaacattttacccaaaattacaatctagtcaagcgtggcaaccgggtgttgctatgcctaatctttacaaaatgcaaagaatgctattagaaaagtgtgaccttcaaaattatggtgatagtgcaacattacctaaaggcataatgatgaatgtcgcaaaatatactcaactgtgtcaatatttaaacacattaacattagctgtaccctataatatgagagttatacattttggtgctggttctgataaaggagttgcaccaggtacagctgttttaagacagtggttgcctacgggtacgctgcttgtcgattcagatcttaatgactttgtctctgatgcagattcaactttgattggtgattgtgcaactgtacatacagctaataaatgggatctcattattagtgatatgtacgaccctaagactaaaaatgttacaaaagaaaatgactctaaagagggttttttcacttacatttgtgggtttatacaacaaaagctagctcttggaggttccgtggctataaagataacagaacattcttggaatgctgatctttataagctcatgggacacttcgcatggtggacagcctttgttactaatgtgaatgcgtcatcatctgaagcatttttaattggatgtaattatcttggcaaaccacgcgaacaaatagatggttatgtcatgcatgcaaattacatattttggaggaatacaaatccaattcagttgtcttcctattctttatttgacatgagtaaatttccccttaaattaaggggtactgctgttatgtctttaaaagaaggtcaaatcaatgatatgattttatctcttcttagtaaaggtagacttataattagagaaaacaacagagttgttatttctagtgatgttcttgttaacaactaa

SEQ ID NO: 314 - DNA, 13218 bp, Severe acute respiratory syndrome coronavirus 2
  source 1..13218: mol_type = unassigned DNA
atggagagccttgtccctggtttcaacgagaaaacacacgtccaactcagtttgcctgttttacaggttcgcgacgtgctcgtacgtggctttggagactccgtggaggaggtcttatcagaggcacgtcaacatcttaaagatggcacttgtggcttagtagaagttgaaaaaggcgttttgcctcaacttgaacagccctatgtgttcatcaaacgttcggatgctcgaactgcacctcatggtcatgttatggttgagctggtagcagaactcgaaggcattcagtacggtcgtagtggtgagacacttggtgtccttgtccctcatgtgggcgaaataccagtggcttaccgcaaggttcttcttcgtaagaacggtaataaaggagctggtggccatagttacggcgccgatctaaagtcatttgacttaggcgacgagcttggcactgatccttatgaagattttcaagaaaactggaacactaaacatagcagtggtgttacccgtgaactcatgcgtgagcttaacggaggggcatacactcgctatgtcgataacaacttctgtggccctgatggctaccctcttgagtgcattaaagaccttctagcacgtgctggtaaagcttcatgcactttgtccgaacaactggactttattgacactaagaggggtgtatactgctgccgtgaacatgagcatgaaattgcttggtacacggaacgttctgaaaagagctatgaattgcagacaccttttgaaattaaattggcaaagaaatttgacaccttcaatggggaatgtccaaattttgtatttcccttaaattccataatcaagactattcaaccaagggttgaaaagaaaaagcttgatggctttatgggtagaattcgatctgtctatccagttgcgtcaccaaatgaatgcaaccaaatgtgcctttcaactctcatgaagtgtgatcattgtggtgaaacttcatggcagacgggcgattttgttaaagccacttgcgaattttgtggcactgagaatttgactaaagaaggtgccactacttgtggttacttaccccaaaatgctgttgttaaaatttattgtccagcatgtcacaattcagaagtaggacctgagcatagtcttgccgaataccataatgaatctggcttgaaaaccattcttcgtaagggtggtcgcactattgcctttggaggctgtgtgttctcttatgttggttgccataacaagtgtgcctattgggttccacgtgctagcgctaacataggttgtaaccatacaggtgttgttggagaaggttccgaaggtcttaatgacaaccttcttgaaatactccaaaaagagaaagtcaacatcaatattgttggtgactttaaacttaatgaagagatcgccattattttggcatctttttctgcttccacaagtgcttttgtggaaactgtgaaaggtttggattataaagcattcaaacaaattgttgaatcctgtggtaattttaaagttacaaaaggaaaagctaaaaaaggtgcctggaatattggtgaacagaaatcaatactgagtcctctttatgcatttgcatcagaggctgctcgtgttgtacgatcaattttctcccgcactcttgaaactgctcaaaattctgtgcgtgttttacagaaggccgctataacaatactagatggaatttcacagtattcactgagactcattgatgctatgatgttcacatctgatttggctactaacaatctagttgtaatggcctacattacaggtggtgttgttcagttgacttcgcagtggctaactaacatctttggcactgtttatgaaaaactcaaacccgtccttgattggcttgaagagaagtttaaggaaggtgtagagtttcttagagacggttgggaaattgttaaatttatctcaacctgtgcttgtgaaattgtcggtggacaaattgtcacctgtgcaaaggaaattaaggagagtgttcagacattctttaagcttgtaaataaatttttggctttgtgtgctgactctatcattattggtggagctaaacttaaagccttgaatttaggtgaaacatttgtcacgcactcaaagggattgtacagaaagtgtgttaaatccagagaagaaactggcctactcatgcctctaaaagccccaaaagaaattatcttcttagagggagaaacacttcccacagaagtgttaacagaggaagttgtcttgaaaactggtgatttacaaccattagaacaacctactagtgaagctgttgaagctccattggttggtacaccagtttgtattaacgggcttatgttgctcgaaatcaaagacacagaaaagtactgtgcccttgcacctaatatgatggtaacaaacaataccttcacactcaaaggcggtgcaccaacaaaggttacttttggtgatgacactgtgatagaagtgcaaggttacaagagtgtgaatatcacttttgaacttgatgaaaggattgataaagtacttaatgagaagtgctctgcctatacagttgaactcggtacagaagtaaatgagttcgcctgtgttgtggcagatgctgtcataaaaactttgcaaccagtatctgaattacttacaccactgggcattgatttagatgagtggagtatggctacatactacttatttgatgagtctggtgagtttaaattggcttcacatatgtattgttctttttaccctccagatgaggatgaagaagaaggtgattgtgaagaagaagagtttgagccatcaactcaatatgagtatggtactgaagatgattaccaaggtaaacctttggaatttggtgccacttctgctgctcttcaacctgaagaagagcaagaagaagattggttagatgatgatagtcaacaaactgttggtcaacaagacggcagtgaggacaatcagacaactactattcaaacaattgttgaggttcaacctcaattagagatggaacttacaccagttgttcagactattgaagtgaatagttttagtggttatttaaaacttactgacaatgtatacattaaaaatgcagacattgtggaagaagctaaaaaggtaaaaccaacagtggttgttaatgcagccaatgtttaccttaaacatggaggaggtgttgcaggagccttaaataaggctactaacaatgccatgcaagttgaatctgatgattacatagctactaatggaccacttaaagtgggtggtagttgtgttttaagcggacacaatcttgctaaacactgtcttcatgttgtcggcccaaatgttaacaaaggtgaagacattcaacttcttaagagtgcttatgaaaattttaatcagcacgaagttctacttgcaccattattatcagctggtatttttggtgctgaccctatacattctttaagagtttgtgtagatactgttcgcacaaatgtctacttagctgtctttgataaaaatctctatgacaaacttgtttcaagctttttggaaatgaagagtgaaaagcaagttgaacaaaagatcgctgagattcctaaagaggaagttaagccatttataactgaaagtaaaccttcagttgaacagagaaaacaagatgataagaaaatcaaagcttgtgttgaagaagttacaacaactctggaagaaactaagttcctcacagaaaacttgttactttatattgacattaatggcaatcttcatccagattctgccactcttgttagtgacattgacatcactttcttaaagaaagatgctccatatatagtgggtgatgttgttcaagagggtgttttaactgctgtggttatacctactaaaaaggctggtggcactactgaaatgctagcgaaagctttgagaaaagtgccaacagacaattatataaccacttacccgggtcagggtttaaatggttacactgtagaggaggcaaagacagtgcttaaaaagtgtaaaagtgccttttacattctaccatctattatctctaatgagaagcaagaaattcttggaactgtttcttggaatttgcgagaaatgcttgcacatgcagaagaaacacgcaaattaatgcctgtctgtgtggaaactaaagccatagtttcaactatacagcgtaaatataagggtattaaaatacaagagggtgtggttgattatggtgctagattttacttttacaccagtaaaacaactgtagcgtcacttatcaacacacttaacgatctaaatgaaactcttgttacaatgccacttggctatgtaacacatggcttaaatttggaagaagctgctcggtatatgagatctctcaaagtgccagctacagtttctgtttcttcacctgatgctgttacagcgtataatggttatcttacttcttcttctaaaacacctgaagaacattttattgaaaccatctcacttgctggttcctataaagattggtcctattctggacaatctacacaactaggtatagaatttcttaagagaggtgataaaagtgtatattacactagtaatcctaccacattccacctagatggtgaagttatcacctttgacaatcttaagacacttctttctttgagagaagtgaggactattaaggtgtttacaacagtagacaacattaacctccacacgcaagttgtggacatgtcaatgacatatggacaacagtttggtccaacttatttggatggagctgatgttactaaaataaaacctcataattcacatgaaggtaaaacattttatgttttacctaatgatgacactctacgtgttgaggcttttgagtactaccacacaactgatcctagttttctgggtaggtacatgtcagcattaaatcacactaaaaagtggaaatacccacaagttaatggtttaacttctattaaatgggcagataacaactgttatcttgccactgcattgttaacactccaacaaatagagttgaagtttaatccacctgctctacaagatgcttattacagagcaagggctggtgaagctgctaacttttgtgcacttatcttagcctactgtaataagacagtaggtgagttaggtgatgttagagaaacaatgagttacttgtttcaacatgccaatttagattcttgcaaaagagtcttgaacgtggtgtgtaaaacttgtggacaacagcagacaacccttaagggtgtagaagctgttatgtacatgggcacactttcttatgaacaatttaagaaaggtgttcagataccttgtacgtgtggtaaacaagctacaaaatatctagtacaacaggagtcaccttttgttatgatgtcagcaccacctgctcagtatgaacttaagcatggtacatttacttgtgctagtgagtacactggtaattaccagtgtggtcactataaacatataacttctaaagaaactttgtattgcatagacggtgctttacttacaaagtcctcagaatacaaaggtcctattacggatgttttctacaaagaaaacagttacacaacaaccataaaaccagttacttataaattggatggtgttgtttgtacagaaattgaccctaagttggacaattattataagaaagacaattcttatttcacagagcaaccaattgatcttgtaccaaaccaaccatatccaaacgcaagcttcgataattttaagtttgtatgtgataatatcaaatttgctgatgatttaaaccagttaactggttataagaaacctgcttcaagagagcttaaagttacatttttccctgacttaaatggtgatgtggtggctattgattataaacactacacaccctcttttaagaaaggagctaaattgttacataaacctattgtttggcatgttaacaatgcaactaataaagccacgtataaaccaaatacctggtgtatacgttgtctttggagcacaaaaccagttgaaacatcaaattcgtttgatgtactgaagtcagaggacgcgcagggaatggataatcttgcctgcgaagatctaaaaccagtctctgaagaagtagtggaaaatcctaccatacagaaagacgttcttgagtgtaatgtgaaaactaccgaagttgtaggagacattatacttaaaccagcaaataatagtttaaaaattacagaagaggttggccacacagatctaatggctgcttatgtagacaattctagtcttactattaagaaacctaatgaattatctagagtattaggtttgaaaacccttgctactcatggtttagctgctgttaatagtgtcccttgggatactatagctaattatgctaagccttttcttaacaaagttgttagtacaactactaacatagttacacggtgtttaaaccgtgtttgtactaattatatgccttatttctttactttattgctacaattgtgtacttttactagaagtacaaattctagaattaaagcatctatgccgactactatagcaaagaatactgttaagagtgtcggtaaattttgtctagaggcttcatttaattatttgaagtcacctaatttttctaaactgataaatattataatttggtttttactattaagtgtttgcctaggttctttaatctactcaaccgctgctttaggtgttttaatgtctaatttaggcatgccttcttactgtactggttacagagaaggctatttgaactctactaatgtcactattgcaacctactgtactggttctataccttgtagtgtttgtcttagtggtttagattctttagacacctatccttctttagaaactatacaaattaccatttcatcttttaaatgggatttaactgcttttggcttagttgcagagtggtttttggcatatattcttttcactaggtttttctatgtacttggattggctgcaatcatgcaattgtttttcagctattttgcagtacattttattagtaattcttggcttatgtggttaataattaatcttgtacaaatggccccgatttcagctatggttagaatgtacatcttctttgcatcattttattatgtatggaaaagttatgtgcatgttgtagacggttgtaattcatcaacttgtatgatgtgttacaaacgtaatagagcaacaagagtcgaatgtacaactattgttaatggtgttagaaggtccttttatgtctatgctaatggaggtaaaggcttttgcaaactacacaattggaattgtgttaattgtgatacattctgtgctggtagtacatttattagtgatgaagttgcgagagacttgtcactacagtttaaaagaccaataaatcctactgaccagtcttcttacatcgttgatagtgttacagtgaagaatggttccatccatctttactttgataaagctggtcaaaagacttatgaaagacattctctctctcattttgttaacttagacaacctgagagctaataacactaaaggttcattgcctattaatgttatagtttttgatggtaaatcaaaatgtgaagaatcatctgcaaaatcagcgtctgtttactacagtcagcttatgtgtcaacctatactgttactagatcaggcattagtgtctgatgttggtgatagtgcggaagttgcagttaaaatgtttgatgcttacgttaatacgttttcatcaacttttaacgtaccaatggaaaaactcaaaacactagttgcaactgcagaagctgaacttgcaaagaatgtgtccttagacaatgtcttatctacttttatttcagcagctcggcaagggtttgttgattcagatgtagaaactaaagatgttgttgaatgtcttaaattgtcacatcaatctgacatagaagttactggcgatagttgtaataactatatgctcacctataacaaagttgaaaacatgacaccccgtgaccttggtgcttgtattgactgtagtgcgcgtcatattaatgcgcaggtagcaaaaagtcacaacattgctttgatatggaacgttaaagatttcatgtcattgtctgaacaactacgaaaacaaatacgtagtgctgctaaaaagaataacttaccttttaagttgacatgtgcaactactagacaagttgttaatgttgtaacaacaaagatagcacttaagggtggtaaaattgttaataattggttgaagcagttaattaaagttacacttgtgttcctttttgttgctgctattttctatttaataacacctgttcatgtcatgtctaaacatactgacttttcaagtgaaatcataggatacaaggctattgatggtggtgtcactcgtgacatagcatctacagatacttgttttgctaacaaacatgctgattttgacacatggtttagccagcgtggtggtagttatactaatgacaaagcttgcccattgattgctgcagtcataacaagagaagtgggttttgtcgtgcctggtttgcctggcacgatattacgcacaactaatggtgactttttgcatttcttacctagagtttttagtgcagttggtaacatctgttacacaccatcaaaacttatagagtacactgactttgcaacatcagcttgtgttttggctgctgaatgtacaatttttaaagatgcttctggtaagccagtaccatattgttatgataccaatgtactagaaggttctgttgcttatgaaagtttacgccctgacacacgttatgtgctcatggatggctctattattcaatttcctaacacctaccttgaaggttctgttagagtggtaacaacttttgattctgagtactgtaggcacggcacttgtgaaagatcagaagctggtgtttgtgtatctactagtggtagatgggtacttaacaatgattattacagatctttaccaggagttttctgtggtgtagatgctgtaaatttacttactaatatgtttacaccactaattcaacctattggtgctttggacatatcagcatctatagtagctggtggtattgtagctatcgtagtaacatgccttgcctactattttatgaggtttagaagagcttttggtgaatacagtcatgtagttgcctttaatactttactattccttatgtcattcactgtactctgtttaacaccagtttactcattcttacctggtgtttattctgttatttacttgtacttgacattttatcttactaatgatgtttcttttttagcacatattcagtggatggttatgttcacacctttagtacctttctggataacaattgcttatatcatttgtatttccacaaagcatttctattggttctttagtaattacctaaagagacgtgtagtctttaatggtgtttcctttagtacttttgaagaagctgcgctgtgcacctttttgttaaataaagaaatgtatctaaagttgcgtagtgatgtgctattacctcttacgcaatataatagatacttagctctttataataagtacaagtattttagtggagcaatggatacaactagctacagagaagctgcttgttgtcatctcgcaaaggctctcaatgacttcagtaactcaggttctgatgttctttaccaaccaccacaaacctctatcacctcagctgttttgcagagtggttttagaaaaatggcattcccatctggtaaagttgagggttgtatggtacaagtaacttgtggtacaactacacttaacggtctttggcttgatgacgtagtttactgtccaagacatgtgatctgcacctctgaagacatgcttaaccctaattatgaagatttactcattcgtaagtctaatcataatttcttggtacaggctggtaatgttcaactcagggttattggacattctatgcaaaattgtgtacttaagcttaaggttgatacagccaatcctaagacacctaagtataagtttgttcgcattcaaccaggacagactttttcagtgttagcttgttacaatggttcaccatctggtgtttaccaatgtgctatgaggcccaatttcactattaagggttcattccttaatggttcatgtggtagtgttggttttaacatagattatgactgtgtctctttttgttacatgcaccatatggaattaccaactggagttcatgctggcacagacttagaaggtaacttttatggaccttttgttgacaggcaaacagcacaagcagctggtacggacacaactattacagttaatgttttagcttggttgtacgctgctgttataaatggagacaggtggtttctcaatcgatttaccacaactcttaatgactttaaccttgtggctatgaagtacaattatgaacctctaacacaagaccatgttgacatactaggacctctttctgctcaaactggaattgccgttttagatatgtgtgcttcattaaaagaattactgcaaaatggtatgaatggacgtaccatattgggtagtgctttattagaagatgaatttacaccttttgatgttgttagacaatgctcaggtgttactttccaaagtgcagtgaaaagaacaatcaagggtacacaccactggttgttactcacaattttgacttcacttttagttttagtccagagtactcaatggtctttgttcttttttttgtatgaaaatgcctttttaccttttgctatgggtattattgctatgtctgcttttgcaatgatgtttgtcaaacataagcatgcatttctctgtttgtttttgttaccttctcttgccactgtagcttattttaatatggtctatatgcctgctagttgggtgatgcgtattatgacatggttggatatggttgatactagtttgtctggttttaagctaaaagactgtgttatgtatgcatcagctgtagtgttactaatccttatgacagcaagaactgtgtatgatgatggtgctaggagagtgtggacacttatgaatgtcttgacactcgtttataaagtttattatggtaatgctttagatcaagccatttccatgtgggctcttataatctctgttacttctaactactcaggtgtagttacaactgtcatgtttttggccagaggtattgtttttatgtgtgttgagtattgccctattttcttcataactggtaatacacttcagtgtataatgctagtttattgtttcttaggctatttttgtacttgttactttggcctcttttgtttactcaaccgctactttagactgactcttggtgtttatgattacttagtttctacacaggagtttagatatatgaattcacagggactactcccacccaagaatagcatagatgccttcaaactcaacattaaattgttgggtgttggtggcaaaccttgtatcaaagtagccactgtacagtctaaaatgtcagatgtaaagtgcacatcagtagtcttactctcagttttgcaacaactcagagtagaatcatcatctaaattgtgggctcaatgtgtccagttacacaatgacattctcttagctaaagatactactgaagcctttgaaaaaatggtttcactactttctgttttgctttccatgcagggtgctgtagacataaacaagctttgtgaagaaatgctggacaacagggcaaccttacaagctatagcctcagagtttagttcccttccatcatatgcagcttttgctactgctcaagaagcttatgagcaggctgttgctaatggtgattctgaagttgttcttaaaaagttgaagaagtctttgaatgtggctaaatctgaatttgaccgtgatgcagccatgcaacgtaagttggaaaagatggctgatcaagctatgacccaaatgtataaacaggctagatctgaggacaagagggcaaaagttactagtgctatgcagacaatgcttttcactatgcttagaaagttggataatgatgcactcaacaacattatcaacaatgcaagagatggttgtgttcccttgaacataatacctcttacaacagcagccaaactaatggttgtcataccagactataacacatataaaaatacgtgtgatggtacaacatttacttatgcatcagcattgtgggaaatccaacaggttgtagatgcagatagtaaaattgttcaacttagtgaaattagtatggacaattcacctaatttagcatggcctcttattgtaacagctttaagggccaattctgctgtcaaattacagaataatgagcttagtcctgttgcactacgacagatgtcttgtgctgccggtactacacaaactgcttgcactgatgacaatgcgttagcttactacaacacaacaaagggaggtaggtttgtacttgcactgttatccgatttacaggatttgaaatgggctagattccctaagagtgatggaactggtactatctatacagaactggaaccaccttgtaggtttgttacagacacacctaaaggtcctaaagtgaagtatttatactttattaaaggattaaacaacctaaatagaggtatggtacttggtagtttagctgccacagtacgtctacaagctggtaatgcaacagaagtgcctgccaattcaactgtattatctttctgtgcttttgctgtagatgctgctaaagcttacaaagattatctagctagtgggggacaaccaatcactaattgtgttaagatgttgtgtacacacactggtactggtcaggcaataacagttacaccggaagccaatatggatcaagaatcctttggtggtgcatcgtgttgtctgtactgccgttgccacatagatcatccaaatcctaaaggattttgtgacttaaaaggtaagtatgtacaaatacctacaacttgtgctaatgaccctgtgggttttacacttaaaaacacagtctgtaccgtctgcggtatgtggaaaggttatggctgtagttgtgatcaactccgcgaacccatgcttcagtcagctgatgcacaatcgtttttaaacgggtttgcggtgtaa

SEQ ID NO: 315 - DNA, 3822 bp, Severe acute respiratory syndrome coronavirus 2
  source 1..3822: mol_type = unassigned DNA
atgtttgtttttcttgttttattgccactagtttctagtcagtgtgttaatcttacaaccagaactcaattaccccctgcatacactaattctttcacacgtggtgtttattaccctgacaaagttttcagatcctcagttttacattcaactcaggacttgttcttacctttcttttccaatgttacttggttccatgctatacatgtctctgggaccaatggtactaagaggtttgataaccctgtcctaccatttaatgatggtgtttattttgcttccactgagaagtctaacataataagaggctggatttttggtactactttagattcgaagacccagtccctacttattgttaataacgctactaatgttgttattaaagtctgtgaatttcaattttgtaatgatccatttttgggtgtttattaccacaaaaacaacaaaagttggatggaaagtgagttcagagtttattctagtgcgaataattgcacttttgaatatgtctctcagccttttcttatggaccttgaaggaaaacagggtaatttcaaaaatcttagggaatttgtgtttaagaatattgatggttattttaaaatatattctaagcacacgcctattaatttagtgcgtgatctccctcagggtttttcggctttagaaccattggtagatttgccaataggtattaacatcactaggtttcaaactttacttgctttacatagaagttatttgactcctggtgattcttcttcaggttggacagctggtgctgcagcttattatgtgggttatcttcaacctaggacttttctattaaaatataatgaaaatggaaccattacagatgctgtagactgtgcacttgaccctctctcagaaacaaagtgtacgttgaaatccttcactgtagaaaaaggaatctatcaaacttctaactttagagtccaaccaacagaatctattgttagatttcctaatattacaaacttgtgcccttttggtgaagtttttaacgccaccagatttgcatctgtttatgcttggaacaggaagagaatcagcaactgtgttgctgattattctgtcctatataattccgcatcattttccacttttaagtgttatggagtgtctcctactaaattaaatgatctctgctttactaatgtctatgcagattcatttgtaattagaggtgatgaagtcagacaaatcgctccagggcaaactggaaagattgctgattataattataaattaccagatgattttacaggctgcgttatagcttggaattctaacaatcttgattctaaggttggtggtaattataattacctgtatagattgtttaggaagtctaatctcaaaccttttgagagagatatttcaactgaaatctatcaggccggtagcacaccttgtaatggtgttgaaggttttaattgttactttcctttacaatcatatggtttccaacccactaatggtgttggttaccaaccatacagagtagtagtactttcttttgaacttctacatgcaccagcaactgtttgtggacctaaaaagtctactaatttggttaaaaacaaatgtgtcaatttcaacttcaatggtttaacaggcacaggtgttcttactgagtctaacaaaaagtttctgcctttccaacaatttggcagagacattgctgacactactgatgctgtccgtgatccacagacacttgagattcttgacattacaccatgttcttttggtggtgtcagtgttataacaccaggaacaaatacttctaaccaggttgctgttctttatcagggtgttaactgcacagaagtccctgttgctattcatgcagatcaacttactcctacttggcgtgtttattctacaggttctaatgtttttcaaacacgtgcaggctgtttaataggggctgaacatgtcaacaactcatatgagtgtgacatacccattggtgcaggtatatgcgctagttatcagactcagactaattctcctcggcgggcacgtagtgtagctagtcaatccatcattgcctacactatgtcacttggtgcagaaaattcagttgcttactctaataactctattgccatacccacaaattttactattagtgttaccacagaaattctaccagtgtctatgaccaagacatcagtagattgtacaatgtacatttgtggtgattcaactgaatgcagcaatcttttgttgcaatatggcagtttttgtacacaattaaaccgtgctttaactggaatagctgttgaacaagacaaaaacacccaagaagtttttgcacaagtcaaacaaatttacaaaacaccaccaattaaagattttggtggttttaatttttcacaaatattaccagatccatcaaaaccaagcaagaggtcatttattgaagatctacttttcaacaaagtgacacttgcagatgctggcttcatcaaacaatatggtgattgccttggtgatattgctgctagagacctcatttgtgcacaaaagtttaacggccttactgttttgccacctttgctcacagatgaaatgattgctcaatacacttctgcactgttagcgggtacaatcacttctggttggacctttggtgcaggtgctgcattacaaataccatttgctatgcaaatggcttataggtttaatggtattggagttacacagaatgttctctatgagaaccaaaaattgattgccaaccaatttaatagtgctattggcaaaattcaagactcactttcttccacagcaagtgcacttggaaaacttcaagatgtggtcaaccaaaatgcacaagctttaaacacgcttgttaaacaacttagctccaattttggtgcaatttcaagtgttttaaatgatatcctttcacgtcttgacaaagttgaggctgaagtgcaaattgataggttgatcacaggcagacttcaaagtttgcagacatatgtgactcaacaattaattagagctgcagaaatcagagcttctgctaatcttgctgctactaaaatgtcagagtgtgtacttggacaatcaaaaagagttgatttttgtggaaagggctatcatcttatgtccttccctcagtcagcacctcatggtgtagtcttcttgcatgtgacttatgtccctgcacaagaaaagaacttcacaactgctcctgccatttgtcatgatggaaaagcacactttcctcgtgaaggtgtctttgtttcaaatggcacacactggtttgtaacacaaaggaatttttatgaaccacaaatcattactacagacaacacatttgtgtctggtaactgtgatgttgtaataggaattgtcaacaacacagtttatgatcctttgcaacctgaattagactcattcaaggaggagttagataaatattttaagaatcatacatcaccagatgttgatttaggtgacatctctggcattaatgcttcagttgtaaacattcaaaaagaaattgaccgcctcaatgaggttgccaagaatttaaatgaatctctcatcgatctccaagaacttggaaagtatgagcagtatataaaatggccatggtacatttggctaggttttatagctggcttgattgccatagtaatggtgacaattatgctttgctgtatgaccagttgctgtagttgtctcaagggctgttgttcttgtggatcctgctgcaaatttgatgaagacgactctgagccagtgctcaaaggagtcaaattacattacacataa

SEQ ID NO: 316 - DNA, 828 bp, Severe acute respiratory syndrome coronavirus 2; identical to SEQ ID NO: 304
  source 1..828: mol_type = unassigned DNA

SEQ ID NO: 317 - DNA, 228 bp, Severe acute respiratory syndrome coronavirus 2; identical to SEQ ID NO: 305
  source 1..228: mol_type = unassigned DNA

SEQ ID NO: 318 - DNA, 669 bp, Severe acute respiratory syndrome coronavirus 2; identical to SEQ ID NO: 306
  source 1..669: mol_type = unassigned DNA

SEQ ID NO: 319 - DNA, 186 bp, Severe acute respiratory syndrome coronavirus 2; identical to SEQ ID NO: 307
  source 1..186: mol_type = unassigned DNA

SEQ ID NO: 320 - DNA, 366 bp, Severe acute respiratory syndrome coronavirus 2; identical to SEQ ID NO: 308
  source 1..366: mol_type = unassigned DNA

SEQ ID NO: 321 - DNA, 132 bp, Severe acute respiratory syndrome coronavirus 2; identical to SEQ ID NO: 309
  source 1..132: mol_type = unassigned DNA

SEQ ID NO: 322 - DNA, 366 bp, Severe acute respiratory syndrome coronavirus 2
  source 1..366: mol_type = unassigned DNA
atgaaatttcttgttttcttaggaatcatcacaactgtagctgcatttcaccaagaatgtagtttacagtcatgtactcaacatcaaccatatgtagttgatgacccgtgtcctattcacttctattctaaatggtatattagagtaggagctagaaaatcagcacctttaattgaattgtgcgtggatgaggctggttctaaatcacccattcagtacatcgatatcggtaattatacagtttcctgtttaccttttacaattaattgccaggaacctaaattgggtagtcttgtagtgcgttgttcgttctatgaagactttttagagtatcatgacgttcgtgttgttttagatttcatctaa

SEQ ID NO: 323 - DNA, 1260 bp, Severe acute respiratory syndrome coronavirus 2
  source 1..1260: mol_type = unassigned DNA
atgtctgataatggaccccaaaatcagcgaaatgcaccccgcattacgtttggtggaccctcagattcaactggcagtaaccagaatggagaacgcagtggggcgcgatcaaaacaacgtcggccccaaggtttacccaataatactgcgtcttggttcaccgctctcactcaacatggcaaggaagaccttaaattccctcgaggacaaggcgttccaattaacaccaatagcagtccagatgaccaaattggctactaccgaagagctaccagacgaattcgtggtggtgacggtaaaatgaaagatctcagtccaagatggtatttctactacctaggaactgggccagaagctggacttccctatggtgctaacaaagacggcatcatatgggttgcaactgagggagccttgaatacaccaaaagatcacattggcacccgcaatcctgctaacaatgctgcaatcgtgctacaacttcctcaaggaacaacattgccaaaaggcttctacgcagaagggagcagaggcggcagtcaagcctcttctcgttcctcatcacgtagtcgcaacagttcaagaaattcaactccaggcagcagtaggggaacttctcctgctagaatggctggcaatggcggtgatgctgctcttgctttgctgctgcttgacagattgaaccagcttgagagcaaaatgtctggtaaaggccaacaacaacaaggccaaactgtcactaagaaatctgctgctgaggcttctaagaagcctcggcaaaaacgtactgccactaaagcatacaatgtaacacaagctttcggcagacgtggtccagaacaaacccaaggaaattttggggaccaggaactaatcagacaaggaactgattacaaacattggccgcaaattgcacaatttgcccccagcgcttcagcgttcttcggaatgtcgcgcattggcatggaagtcacaccttcgggaacgtggttgacctacacaggtgccatcaaattggatgacaaagatccaaatttcaaagatcaagtcattttgctgaataagcatattgacgcatacaaaacattcccaccaacagagcctaaaaaggacaaaaagaagaaggctgatgaaactcaagccttaccgcagagacagaagaaacagcaaactgtgactcttcttcctgctgcagatttggatgatttctccaaacaattgcaacaatccatgagcagtgctgactcaactcaggcctaa

SEQ ID NO: 324 - DNA, 117 bp, Severe acute respiratory syndrome coronavirus 2; identical to SEQ ID NO: 312
  source 1..117: mol_type = unassigned DNA

SEQ ID NO: 325 - DNA, 21291 bp, Severe acute respiratory syndrome coronavirus 2
  source 1..21291: mol_type = unassigned DNA
atggagagccttgtccctggtttcaacgagaaaacacacgtccaactcagtttgcctgttttacaggttcgcgacgtgctcgtacgtggctttggagactccgtggaggaggtcttatcagaggcacgtcaacatcttaaagatggcacttgtggcttagtagaagttgaaaaaggcgttttgcctcaacttgaacagccctatgtgttcatcaaacgttcggatgctcgaactgcacctcatggtcatgttatggttgagctggtagcagaactcgaaggcattcagtacggtcgtagtggtgagacacttggtgtccttgtccctcatgtgggcgaaataccagtggcttaccgcaaggttcttcttcgtaagaacggtaataaaggagctggtggccatagttacggcgccgatctaaagtcatttgacttaggcgacgagcttggcactgatccttatgaagattttcaagaaaactggaacactaaacatagcagtggtgttacccgtgaactcatgcgtgagcttaacggaggggcatacactcgctatgtcgataacaacttctgtggccctgatggctaccctcttgagtgcattaaagaccttctagcacgtgctggtaaagcttcatgcactttgtccgaacaactggactttattgacactaagaggggtgtatactgctgccgtgaacatgagcatgaaattgcttggtacacggaacgttctgaaaagagctatgaattgcagacaccttttgaaattaaattggcaaagaaatttgacaccttcaatggggaatgtccaaattttgtatttcccttaaattccataatcaagactattcaaccaagggttgaaaagaaaaagcttgatggctttatgggtagaattcgatctgtctatccagttgcgtcaccaaatgaatgcaaccaaatgtgcctttcaactctcatgaagtgtgatcattgtggtgaaacttcatggcagacgggcgattttgttaaagccacttgcgaattttgtggcactgagaatttgactaaagaaggtgccactacttgtggttacttaccccaaaatgctgttgttaaaatttattgtccagcatgtcacaattcagaagtaggacctgagcatagtcttgccgaataccataatgaatctggcttgaaaaccattcttcgtaagggtggtcgcactattgcctttggaggctgtgtgttctcttatgttggttgccataacaagtgtgcctattgggttccacgtgctagcgctaacataggttgtaaccatacaggtgttgttggagaaggttccgaaggtcttaatgacaaccttcttgaaatactccaaaaagagaaagtcaacatcaatattgttggtgactttaaacttaatgaagagatcgccattattttggcatctttttctgcttccacaagtgcttttgtggaaactgtgaaaggtttggattataaagcattcaaacaaattgttgaatcctgtggtaattttaaagttacaaaaggaaaagctaaaaaaggtgcctggaatattggtgaacagaaatcaatactgagtcctctttatgcatttgcatcagaggctgctcgtgttgtacgatcaattttctcccgcactcttgaaactgctcaaaattctgtgcgtgttttacagaaggccgctataacaatactagatggaatttcacagtattcactgagactcattgatgctatgatgttcacatctgatttggctactaacaatctagttgtaatggcctacattacaggtggtgttgttcagttgacttcgcagtggctaactaacatctttggcactgtttatgaaaaactcaaacccgtccttgattggcttgaagagaagtttaaggaaggtgtagagtttcttagagacggttgggaaattgttaaatttatctcaacctgtgcttgtgaaattgtcggtggacaaattgtcacctgtgcaaaggaaattaaggagagtgttcagacattctttaagcttgtaaataaatttttggctttgtgtgctgactctatcattattggtggagctaaacttaaagccttgaatttaggtgaaacatttgtcacgcactcaaagggattgtacagaaagtgtgttaaatccagagaagaaactggcctactcatgcctctaaaagccccaaaagaaattatcttcttagagggagaaacacttcccacagaagtgttaacagaggaagttgtcttgaaaactggtgatttacaaccattagaacaacctactagtgaagctgttgaagctccattggttggtacaccagtttgtattaacgggcttatgttgctcgaaatcaaagacacagaaaagtactgtgcccttgcacctaatatgatggtaacaaacaataccttcacactcaaaggcggtgcaccaacaaaggttacttttggtgatgacactgtgatagaagtgcaaggttacaagagtgtgaatatcacttttgaacttgatgaaaggattgataaagtacttaatgagaagtgctctgcctatacagttgaactcggtacagaagtaaatgagttcgcctgtgttgtggcagatgctgtcataaaaactttgcaaccagtatctgaattacttacaccactgggcattgatttagatgagtggagtatggctacatactacttatttgatgagtctggtgagtttaaattggcttcacatatgtattgttctttttaccctccagatgaggatgaagaagaaggtgattgtgaagaagaagagtttgagccatcaactcaatatgagtatggtactgaagatgattaccaaggtaaacctttggaatttggtgccacttctgctgctcttcaacctgaagaagagcaagaagaagattggttagatgatgatagtcaacaaactgttggtcaacaagacggcagtgaggacaatcagacaactactattcaaacaattgttgaggttcaacctcaattagagatggaacttacaccagttgttcagactattgaagtgaatagttttagtggttatttaaaacttactgacaatgtatacattaaaaatgcagacattgtggaagaagctaaaaaggtaaaaccaacagtggttgttaatgcagccaatgtttaccttaaacatggaggaggtgttgcaggagccttaaataaggctactaacaatgccatgcaagttgaatctgatgattacatagctactaatggaccacttaaagtgggtggtagttgtgttttaagcggacacaatcttgctaaacactgtcttcatgttgtcggcccaaatgttaacaaaggtgaagacattcaacttcttaagagtgcttatgaaaattttaatcagcacgaagttctacttgcaccattattatcagctggtatttttggtgctgaccctatacattctttaagagtttgtgtagatactgttcgcacaaatgtctacttagctgtctttgataaaaatctctatgacaaacttgtttcaagctttttggaaatgaagagtgaaaagcaagttgaacaaaagatcgctgagattcctaaagaggaagttaagccatttataactgaaagtaaaccttcagttgaacagagaaaacaagatgataagaaaatcaaagcttgtgttgaagaagttacaacaactctggaagaaactaagttcctcacagaaaacttgttactttatattgacattaatggcaatcttcatccagattctgccactcttgttagtgacattgacatcactttcttaaagaaagatgctccatatatagtgggtgatgttgttcaagagggtgttttaactgctgtggttatacctactaaaaaggctggtggcactactgaaatgctagcgaaagctttgagaaaagtgccaacagacaattatataaccacttacccgggtcagggtttaaatggttacactgtagaggaggcaaagacagtgcttaaaaagtgtaaaagtgccttttacattctaccatctattatctctaatgagaagcaagaaattcttggaactgtttcttggaatttgcgagaaatgcttgcacatgcagaagaaacacgcaaattaatgcctgtctgtgtggaaactaaagccatagtttcaactatacagcgtaaatataagggtattaaaatacaagagggtgtggttgattatggtgctagattttacttttacaccagtaaaacaactgtagcgtcacttatcaacacacttaacgatctaaatgaaactcttgttacaatgccacttggctatgtaacacatggcttaaatttggaagaagctgctcggtatatgagatctctcaaagtgccagctacagtttctgtttcttcacctgatgctgttacagcgtataatggttatcttacttcttcttctaaaacacctgaagaacattttattgaaaccatctcacttgctggttcctataaagattggtcctattctggacaatctacacaactaggtatagaatttcttaagagaggtgataaaagtgtatattacactagtaatcctaccacattccacctagatggtgaagttatcacctttgacaatcttaagacacttctttctttgagagaagtgaggactattaaggtgtttacaacagtagacaacattaacctccacacgcaagttgtggacatgtcaatgacatatggacaacagtttggtccaacttatttggatggagctgatgttactaaaataaaacctcataattcacatgaaggtaaaacattttatgttttacctaatgatgacactctacgtgttgaggcttttgagtactaccacacaactgatcctagttttctgggtaggtacatgtcagcattaaatcacactaaaaagtggaaatacccacaagttaatggtttaacttctattaaatgggcagataacaactgttatcttgccactgcattgttaacactccaacaaatagagttgaagtttaatccacctgctctacaagatgcttattacagagcaagggctggtgaagctgctaacttttgtgcacttatcttagcctactgtaataagacagtaggtgagttaggtgatgttagagaaacaatgagttacttgtttcaacatgccaatttagattcttgcaaaagagtcttgaacgtggtgtgtaaaacttgtggacaacagcagacaacccttaagggtgtagaagctgttatgtacatgggcacactttcttatgaacaatttaagaaaggtgttcagataccttgtacgtgtggtaaacaagctacaaaatatctagtacaacaggagtcaccttttgttatgatgtcagcaccacctgctcagtatgaacttaagcatggtacatttacttgtgctagtgagtacactggtaattaccagtgtggtcactataaacatataacttctaaagaaactttgtattgcatagacggtgctttacttacaaagtcctcagaatacaaaggtcctattacggatgttttctacaaagaaaacagttacacaacaaccataaaaccagttacttataaattggatggtgttgtttgtacagaaattgaccctaagttggacaattattataagaaagacaattcttatttcacagagcaaccaattgatcttgtaccaaaccaaccatatccaaacgcaagcttcgataattttaagtttgtatgtgataatatcaaatttgctgatgatttaaaccagttaactggttataagaaacctgcttcaagagagcttaaagttacatttttccctgacttaaatggtgatgtggtggctattgattataaacactacacaccctcttttaagaaaggagctaaattgttacataaacctattgtttggcatgttaacaatgcaactaataaagccacgtataaaccaaatacctggtgtatacgttgtctttggagcacaaaaccagttgaaacatcaaattcgtttgatgtactgaagtcagaggacgcgcagggaatggataatcttgcctgcgaagatctaaaaccagtctctgaagaagtagtggaaaatcctaccatacagaaagacgttcttgagtgtaatgtgaaaactaccgaagttgtaggagacattatacttaaaccagcaaataatagtttaaaaattacagaagaggttggccacacagatctaatggctgcttatgtagacaattctagtcttactattaagaaacctaatgaattatctagagtattaggtttgaaaacccttgctactcatggtttagctgctgttaatagtgtcccttgggatactatagctaattatgctaagccttttcttaacaaagttgttagtacaactactaacatagttacacggtgtttaaaccgtgtttgtactaattatatgccttatttctttactttattgctacaattgtgtacttttactagaagtacaaattctagaattaaagcatctatgccgactactatagcaaagaatactgttaagagtgtcggtaaattttgtctagaggcttcatttaattatttgaagtcacctaatttttctaaactgataaatattataatttggtttttactattaagtgtttgcctaggttctttaatctactcaaccgctgctttaggtgttttaatgtctaatttaggcatgccttcttactgtactggttacagagaaggctatttgaactctactaatgtcactattgcaacctactgtactggttctataccttgtagtgtttgtcttagtggtttagattctttagacacctatccttctttagaaactatacaaattaccatttcatcttttaaatgggatttaactgcttttggcttagttgcagagtggtttttggcatatattcttttcactaggtttttctatgtacttggattggctgcaatcatgcaattgtttttcagctattttgcagtacattttattagtaattcttggcttatgtggttaataattaatcttgtacaaatggccccgatttcagctatggttagaatgtacatcttctttgcatcattttattatgtatggaaaagttatgtgcatgttgtagacggttgtaattcatcaacttgtatgatgtgttacaaacgtaatagagcaacaagagtcgaatgtacaactattgttaatggtgttagaaggtccttttatgtctatgctaatggaggtaaaggcttttgcaaactacacaattggaattgtgttaattgtgatacattctgtgctggtagtacatttattagtgatgaagttgcgagagacttgtcactacagtttaaaagaccaataaatcctactgaccagtcttcttacatcgttgatagtgttacagtgaagaatggttccatccatctttactttgataaagctggtcaaaagacttatgaaagacattctctctctcattttgttaacttagacaacctgagagctaataacactaaaggttcattgcctattaatgttatagtttttgatggtaaatcaaaatgtgaagaatcatctgcaaaatcagcgtctgtttactacagtcagcttatgtgtcaacctatactgttactagatcaggcattagtgtctgatgttggtgatagtgcggaagttgcagttaaaatgtttgatgcttacgttaatacgttttcatcaacttttaacgtaccaatggaaaaactcaaaacactagttgcaactgcagaagctgaacttgcaaagaatgtgtccttagacaatgtcttatctacttttatttcagcagctcggcaagggtttgttgattcagatgtagaaactaaagatgttgttgaatgtcttaaattgtcacatcaatctgacatagaagttactggcgatagttgtaataactatatgctcacctataacaaagttgaaaacatgacaccccgtgaccttggtgcttgtattgactgtagtgcgcgtcatattaatgcgcaggtagcaaaaagtcacaacattgctttgatatggaacgttaaagatttcatgtcattgtctgaacaactacgaaaacaaatacgtagtgctgctaaaaagaataacttaccttttaagttgacatgtgcaactactagacaagttgttaatgttgtaacaacaaagatagcacttaagggtggtaaaattgttaataattggttgaagcagttaattaaagttacacttgtgttcctttttgttgctgctattttctatttaataacacctgttcatgtcatgtctaaacatactgacttttcaagtgaaatcataggatacaaggctattgatggtggtgtcactcgtgacatagcatctacagatacttgttttgctaacaaacatgctgattttgacacatggtttagccagcgtggtggtagttatactaatgacaaagcttgcccattgattgctgcagtcataacaagagaagtgggttttgtcgtgcctggtttgcctggcacgatattacgcacaactaatggtgactttttgcatttcttacctagagtttttagtgcagttggtaacatctgttacacaccatcaaaacttatagagtacactgactttgcaacatcagcttgtgttttggctgctgaatgtacaatttttaaagatgcttctggtaagccagtaccatattgttatgataccaatgtactagaaggttctgttgcttatgaaagtttacgccctgacacacgttatgtgctcatggatggctctattattcaatttcctaacacctaccttgaaggttctgttagagtggtaacaacttttgattctgagtactgtaggcacggcacttgtgaaagatcagaagctggtgtttgtgtatctactagtggtagatgggtacttaacaatgattattacagatctttaccaggagttttctgtggtgtagatgctgtaaatttacttactaatatgtttacaccactaattcaacctattggtgctttggacatatcagcatctatagtagctggtggtattgtagctatcgtagtaacatgccttgcctactattttatgaggtttagaagagcttttggtgaatacagtcatgtagttgcctttaatactttactattccttatgtcattcactgtactctgtttaacaccagtttactcattcttacctggtgtttattctgttatttacttgtacttgacattttatcttactaatgatgtttcttttttagcacatattcagtggatggttatgttcacacctttagtacctttctggataacaattgcttatatcatttgtatttccacaaagcatttctattggttctttagtaattacctaaagagacgtgtagtctttaatggtgtttcctttagtacttttgaagaagctgcgctgtgcacctttttgttaaataaagaaatgtatctaaagttgcgtagtgatgtgctattacctcttacgcaatataatagatacttagctctttataataagtacaagtattttagtggagcaatggatacaactagctacagagaagctgcttgttgtcatctcgcaaaggctctcaatgacttcagtaactcaggttctgatgttctttaccaaccaccacaaacctctatcacctcagctgttttgcagagtggttttagaaaaatggcattcccatctggtaaagttgagggttgtatggtacaagtaacttgtggtacaactacacttaacggtctttggcttgatgacgtagtttactgtccaagacatgtgatctgcacctctgaagacatgcttaaccctaattatgaagatttactcattcgtaagtctaatcataatttcttggtacaggctggtaatgttcaactcagggttattggacattctatgcaaaattgtgtacttaagcttaaggttgatacagccaatcctaagacacctaagtataagtttgttcgcattcaaccaggacagactttttcagtgttagcttgttacaatggttcaccatctggtgtttaccaatgtgctatgaggcccaatttcactattaagggttcattccttaatggttcatgtggtagtgttggttttaacatagattatgactgtgtctctttttgttacatgcaccatatggaattaccaactggagttcatgctggcacagacttagaaggtaacttttatggaccttttgttgacaggcaaacagcacaagcagctggtacggacacaactattacagttaatgttttagcttggttgtacgctgctgttataaatggagacaggtggtttctcaatcgatttaccacaactcttaatgactttaaccttgtggctatgaagtacaattatgaacctctaacacaagaccatgttgacatactaggacctctttctgctcaaactggaattgccgttttagatatgtgtgcttcattaaaagaattactgcaaaatggtatgaatggacgtaccatattgggtagtgctttattagaagatgaatttacaccttttgatgttgttagacaatgctcaggtgttactttccaaagtgcagtgaaaagaacaatcaagggtacacaccactggttgttactcacaattttgacttcacttttagttttagtccagagtactcaatggtctttgttcttttttttgtatgaaaatgcctttttaccttttgctatgggtattattgctatgtctgcttttgcaatgatgtttgtcaaacataagcatgcatttctctgtttgtttttgttaccttctcttgccactgtagcttattttaatatggtctatatgcctgctagttgggtgatgcgtattatgacatggttggatatggttgatactagtttgtctggttttaagctaaaagactgtgttatgtatgcatcagctgtagtgttactaatccttatgacagcaagaactgtgtatgatgatggtgctaggagagtgtggacacttatgaatgtcttgacactcgtttataaagtttattatggtaatgctttagatcaagccatttccatgtgggctcttataatctctgttacttctaactactcaggtgtagttacaactgtcatgtttttggccagaggtattgtttttatgtgtgttgagtattgccctattttcttcataactggtaatacacttcagtgtataatgctagtttattgtttcttaggctatttttgtacttgttactttggcctcttttgtttactcaaccgctactttagactgactcttggtgtttatgattacttagtttctacacaggagtttagatatatgaattcacagggactactcccacccaagaatagcatagatgccttcaaactcaacattaaattgttgggtgttggtggcaaaccttgtatcaaagtagccactgtacagtctaaaatgtcagatgtaaagtgcacatcagtagtcttactctcagttttgcaacaactcagagtagaatcatcatctaaattgtgggctcaatgtgtccagttacacaatgacattctcttagctaaagatactactgaagcctttgaaaaaatggtttcactactttctgttttgctttccatgcagggtgctgtagacataaacaagctttgtgaagaaatgctggacaacagggcaaccttacaagctatagcctcagagtttagttcccttccatcatatgcagcttttgctactgctcaagaagcttatgagcaggctgttgctaatggtgattctgaagttgttcttaaaaagttgaagaagtctttgaatgtggctaaatctgaatttgaccgtgatgcagccatgcaacgtaagttggaaaagatggctgatcaagctatgacccaaatgtataaacaggctagatctgaggacaagagggcaaaagttactagtgctatgcagacaatgcttttcactatgcttagaaagttggataatgatgcactcaacaacattatcaacaatgcaagagatggttgtgttcccttgaacataatacctcttacaacagcagccaaactaatggttgtcataccagactataacacatataaaaatacgtgtgatggtacaacatttacttatgcatcagcattgtgggaaatccaacaggttgtagatgcagatagtaaaattgttcaacttagtgaaattagtatggacaattcacctaatttagcatggcctcttattgtaacagctttaagggccaattctgctgtcaaattacagaataatgagcttagtcctgttgcactacgacagatgtcttgtgctgccggtactacacaaactgcttgcactgatgacaatgcgttagcttactacaacacaacaaagggaggtaggtttgtacttgcactgttatccgatttacaggatttgaaatgggctagattccctaagagtgatggaactggtactatctatacagaactggaaccaccttgtaggtttgttacagacacacctaaaggtcctaaagtgaagtatttatactttattaaaggattaaacaacctaaatagaggtatggtacttggtagtttagctgccacagtacgtctacaagctggtaatgcaacagaagtgcctgccaattcaactgtattatctttctgtgcttttgctgtagatgctgctaaagcttacaaagattatctagctagtgggggacaaccaatcactaattgtgttaagatgttgtgtacacacactggtactggtcaggcaataacagttacaccggaagccaatatggatcaagaatcctttggtggtgcatcgtgttgtctgtactgccgttgccacatagatcatccaaatcctaaaggattttgtgacttaaaaggtaagtatgtacaaatacctacaacttgtgctaatgaccctgtgggttttacacttaaaaacacagtctgtaccgtctgcggtatgtggaaaggttatggctgtagttgtgatcaactccgcgaacccatgcttcagtcagctgatgcacaatcgtttttaaaccgggtttgcggtgtaagtgcagcccgtcttacaccgtgcggcacaggcactagtactgatgtcgtatacagggcttttgacatctacaatgataaagtagctggttttgctaaattcctaaaaactaattgttgtcgcttccaagaaaaggacgaagatgacaatttaattgattcttactttgtagttaagagacacactttctctaactaccaacatgaagaaacaatttataatttacttaaggattgtccagctgttgctaaacatgacttctttaagtttagaatagacggtgacatggtaccacatatatcacgtcaacgtcttactaaatacacaatggcagacctcgtctatgctttaaggcattttgatgaaggtaattgtgacacattaaaagaaatacttgtcacatacaattgttgtgatgatgattatttcaataaaaaggactggtatgattttgtagaaaacccagatatattacgcgtatacgccaacttaggtgaacgtgtacgccaagctttgttaaaaacagtacaattctgtgatgccatgcgaaatgctggtattgttggtgtactgacattagataatcaagatctcaatggtaactggtatgatttcggtgatttcatacaaaccacgccaggtagtggagttcctgttgtagattcttattattcattgttaatgcctatattaaccttgaccagggctttaactgcagagtcacatgttgacactgacttaacaaagccttacattaagtgggatttgttaaaatatgacttcacggaagagaggttaaaactctttgaccgttattttaaatattgggatcagacataccacccaaattgtgttaactgtttggatgacagatgcattctgcattgtgcaaactttaatgttttattctctacagtgttcccacttacaagttttggaccactagtgagaaaaatatttgttgatggtgttccatttgtagtttcaactggataccacttcagagagctaggtgttgtacataatcaggatgtaaacttacatagctctagacttagttttaaggaattacttgtgtatgctgctgaccctgctatgcacgctgcttctggtaatctattactagataaacgcactacgtgcttttcagtagctgcacttactaacaatgttgcttttcaaactgtcaaacccggtaattttaacaaagacttctatgactttgctgtgtctaagggtttctttaaggaaggaagttctgttgaattaaaacacttcttctttgctcaggatggtaatgctgctatcagcgattatgactactatcgttataatctaccaacaatgtgtgatatcagacaactactatttgtagttgaagttgttgataagtactttgattgttacgatggtggctgtattaatgctaaccaagtcatcgtcaacaacctagacaaatcagctggttttccatttaataaatggggtaaggctagactttattatgattcaatgagttatgaggatcaagatgcacttttcgcatatacaaaacgtaatgtcatccctactataactcaaatgaatcttaagtatgccattagtgcaaagaatagagctcgcaccgtagctggtgtctctatctgtagtactatgaccaatagacagtttcatcaaaaattattgaaatcaatagccgccactagaggagctactgtagtaattggaacaagcaaattctatggtggttggcacaacatgttaaaaactgtttatagtgatgtagaaaaccctcaccttatgggttgggattatcctaaatgtgatagagccatgcctaacatgcttagaattatggcctcacttgttcttgctcgcaaacatacaacgtgttgtagcttgtcacaccgtttctatagattagctaatgagtgtgctcaagtattgagtgaaatggtcatgtgtggcggttcactatatgttaaaccaggtggaacctcatcaggagatgccacaactgcttatgctaatagtgtttttaacatttgtcaagctgtcacggccaatgttaatgcacttttatctactgatggtaacaaaattgccgataagtatgtccgcaatttacaacacagactttatgagtgtctctatagaaatagagatgttgacacagactttgtgaatgagttttacgcatatttgcgtaaacatttctcaatgatgatactctctgacgatgctgttgtgtgtttcaatagcacttatgcatctcaaggtctagtggctagcataaagaactttaagtcagttctttattatcaaaacaatgtttttatgtctgaagcaaaatgttggactgagactgaccttactaaaggacctcatgaattttgctctcaacatacaatgctagttaaacagggtgatgattatgtgtaccttccttacccagatccatcaagaatcctaggggccggctgttttgtagatgatatcgtaaaaacagatggtacacttatgattgaacggttcgtgtctttagctatagatgcttacccacttactaaacatcctaatcaggagtatgctgatgtctttcatttgtacttacaatacataagaaagctacatgatgagttaacaggacacatgttagacatgtattctgttatgcttactaatgataacacttcaaggtattgggaacctgagttttatgaggctatgtacacaccgcatacagtcttacaggctgttggggcttgtgttctttgcaattcacagacttcattaagatgtggtgcttgcatacgtagaccattcttatgttgtaaatgctgttacgaccatgtcatatcaacatcacataaattagtcttgtctgttaatccgtatgtttgcaatgctccaggttgtgatgtcacagatgtgactcaactttacttaggaggtatgagctattattgtaaatcacataaaccacccattagttttccattgtgtgctaatggacaagtttttggtttatataaaaatacatgtgttggtagcgataatgttactgactttaatgcaattgcaacatgtgactggacaaatgctggtgattacattttagctaacacctgtactgaaagactcaagctttttgcagcagaaacgctcaaagctactgaggagacatttaaactgtcttatggtattgctactgtacgtgaagtgctgtctgacagagaattacatctttcatgggaagttggtaaacctagaccaccacttaaccgaaattatgtctttactggttatcgtgtaactaaaaacagtaaagtacaaataggagagtacacctttgaaaaaggtgactatggtgatgctgttgtttaccgaggtacaacaacttacaaattaaatgttggtgattattttgtgctgacatcacatacagtaatgccattaagtgcacctacactagtgccacaagagcactatgttagaattactggcttatacccaacactcaatatctcagatgagttttctagcaatgttgcaaattatcaaaaggttggtatgcaaaagtattctacactccagggaccacctggtactggtaagagtcattttgctattggcctagctctctactacccttctgctcgcatagtgtatacagcttgctctcatgccgctgttgatgcactatgtgagaaggcattaaaatatttgcctatagataaatgtagtagaattatacctgcacgtgctcgtgtagagtgttttgataaattcaaagtgaattcaacattagaacagtatgtcttttgtactgtaaatgcattgcctgagacgacagcagatatagttgtctttgatgaaatttcaatggccacaaattatgatttgagtgttgtcaatgccagattacgtgctaagcactatgtgtacattggcgaccctgctcaattacctgcaccacgcacattgctaactaagggcacactagaaccagaatatttcaattcagtgtgtagacttatgaaaactataggtccagacatgttcctcggaacttgtcggcgttgtcctgctgaaattgttgacactgtgagtgctttggtttatgataataagcttaaagcacataaagacaaatcagctcaatgctttaaaatgttttataagggtgttatcacgcatgatgtttcatctgcaattaacaggccacaaataggcgtggtaagagaattccttacacgtaaccctgcttggagaaaagctgtctttatttcaccttataattcacagaatgctgtagcctcaaagattttgggactaccaactcaaactgttgattcatcacagggctcagaatatgactatgtcatattcactcaaaccactgaaacagctcactcttgtaatgtaaacagatttaatgttgctattaccagagcaaaagtaggcatactttgcataatgtctgatagagacctttatgacaagttgcaatttacaagtcttgaaattccacgtaggaatgtggcaactttacaagctgaaaatgtaacaggactctttaaagattgtagtaaggtaatcactgggttacatcctacacaggcacctacacacctcagtgttgacactaaattcaaaactgaaggtttatgtgttgacatacctggcatacctaaggacatgacctatagaagactcatctctatgatgggttttaaaatgaattatcaagttaatggttaccctaacatgtttatcacccgcgaagaagctataagacatgtacgtgcatggattggcttcgatgtcgaggggtgtcatgctactagagaagctgttggtaccaatttacctttacagctaggtttttctacaggtgttaacctagttgctgtacctacaggttatgttgatacacctaataatacagatttttccagagttagtgctaaaccaccgcctggagatcaatttaaacacctcataccacttatgtacaaaggacttccttggaatgtagtgcgtataaagattgtacaaatgttaagtgacacacttaaaaatctctctgacagagtcgtatttgtcttatgggcacatggctttgagttgacatctatgaagtattttgtgaaaataggacctgagcgcacctgttgtctatgtgatagacgtgccacatgcttttccactgcttcagacacttatgcctgttggcatcattctattggatttgattacgtctataatccgtttatgattgatgttcaacaatggggttttacaggtaacctacaaagcaaccatgatctgtattgtcaagtccatggtaatgcacatgtagctagttgtgatgcaatcatgactaggtgtctagctgtccacgagtgctttgttaagcgtgttgactggactattgaatatcctataattggtgatgaactgaagattaatgcggcttgtagaaaggttcaacacatggttgttaaagctgcattattagcagacaaattcccagttcttcacgacattggtaaccctaaagctattaagtgtgtacctcaagctgatgtagaatggaagttctatgatgcacagccttgtagtgacaaagcttataaaatagaagaattattctattcttatgccacacattctgacaaattcacagatggtgtatgcctattttggaattgcaatgtcgatagatatcctgctaattccattgtttgtagatttgacactagagtgctatctaaccttaacttgcctggttgtgatggtggcagtttgtatgtaaataaacatgcattccacacaccagcttttgataaaagtgcttttgttaatttaaaacaattaccatttttctattactctgacagtccatgtgagtctcatggaaaacaagtagtgtcagatatagattatgtaccactaaagtctgctacgtgtataacacgttgcaatttaggtggtgctgtctgtagacatcatgctaatgagtacagattgtatctcgatgcttataacatgatgatctcagctggctttagcttgtgggtttacaaacaatttgatacttataacctctggaacacttttacaagacttcagagtttagaaaatgtggcttttaatgttgtaaataagggacactttgatggacaacagggtgaagtaccagtttctatcattaataacactgtttacacaaaagttgatggtgttgatgtagaattgtttgaaaataaaacaacattacctgttaatgtagcatttgagctttgggctaagcgcaacattaaaccagtaccagaggtgaaaatactcaataatttgggtgtggacattgctgctaatactgtgatctgggactacaaaagagatgctccagcacatatatctactattggtgtttgttctatgactgacatagccaagaaaccaactgaaacgatttgtgcaccactcactgtcttttttgatggtagagttgatggtcaagtagacttatttagaaatgcccgtaatggtgttcttattacagaaggtagtgttaaaggtttacaaccatctgtaggtcccaaacaagctagtcttaatggagtcacattaattggagaagccgtaaaaacacagttcaattattataagaaagttgatggtgttgtccaacaattacctgaaacttactttactcagagtagaaatttacaagaatttaaacccaggagtcaaatggaaattgatttcttagaattagctatggatgaattcattgaacggtataaattagaaggctatgccttcgaacatatcgtttatggagattttagtcatagtcagttaggtggtttacatctactgattggactagctaaacgttttaaggaatcaccttttgaattagaagattttattcctatggacagtacagttaaaaactatttcataacagatgcgcaaacaggttcatctaagtgtgtgtgttctgttattgatttattacttgatgattttgttgaaataataaaatcccaagatttatctgtagtttctaaggttgtcaaagtgactattgactatacagaaatttcatttatgctttggtgtaaagatggccatgtagaaacattttacccaaaattacaatctagtcaagcgtggcaaccgggtgttgctatgcctaatctttacaaaatgcaaagaatgctattagaaaagtgtgaccttcaaaattatggtgatagtgcaacattacctaaaggcataatgatgaatgtcgcaaaatatactcaactgtgtcaatatttaaacacattaacattagctgtaccctataatatgagagttatacattttggtgctggttctgataaaggagttgcaccaggtacagctgttttaagacagtggttgcctacgggtacgctgcttgtcgattcagatcttaatgactttgtctctgatgcagattcaactttgattggtgattgtgcaactgtacatacagctaataaatgggatctcattattagtgatatgtacgaccctaagactaaaaatgttacaaaagaaaatgactctaaagagggttttttcacttacatttgtgggtttatacaacaaaagctagctcttggaggttccgtggctataaagataacagaacattcttggaatgctgatctttataagctcatgggacacttcgcatggtggacagcctttgttactaatgtgaatgcgtcatcatctgaagcatttttaattggatgtaattatcttggcaaaccacgcgaacaaatagatggttatgtcatgcatgcaaattacatattttggaggaatacaaatccaattcagttgtcttcctattctttatttgacatgagtaaatttccccttaaattaaggggtactgctgttatgtctttaaaagaaggtcaaatcaatgatatgattttatctcttcttagtaaaggtagacttataattagagaaaacaacagagttgttatttctagtgatgttcttgttaacaactaa

SEQ ID NO: 326 - DNA, 13218 bp, Severe acute respiratory syndrome coronavirus 2; identical to SEQ ID NO: 314
  source 1..13218: mol_type = unassigned DNA

SEQ ID NO: 327 - DNA, 3822 bp, Severe acute respiratory syndrome coronavirus 2
  source 1..3822: mol_type = unassigned DNA
atgtttgtttttcttgttttattgccactagtctctagtcagtgtgttaatcttacaaccagaactcaattaccccctgcatacactaattctttcacacgtggtgtttattaccctgacaaagttttcagatcctcagttttacattcaactcaggacttgttcttacctttcttttccaatgttacttggttccatgctatacatgtctctgggaccaatggtactaagaggtttgataaccctgtcctaccatttaatgatggtgtttattttgcttccactgagaagtctaacataataagaggctggatttttggtactactttagattcgaagacccagtccctacttattgttaataacgctactaatgttgttattaaagtctgtgaatttcaattttgtaatgatccatttttgggtgtttattaccacaaaaacaacaaaagttggatggaaagtgagttcagagtttattctagtgcgaataattgcacttttgaatatgtctctcagccttttcttatggaccttgaaggaaaacagggtaatttcaaaaatcttagggaatttgtgtttaagaatattgatggttattttaaaatatattctaagcacacgcctattaatttagtgcgtgatctccctcagggtttttcggctttagaaccattggtagatttgccaataggtattaacatcactaggtttcaaactttacttgctttacatagaagttatttgactcctggtgattcttcttcaggttggacagctggtgctgcagcttattatgtgggttatcttcaacctaggacttttctattaaaatataatgaaaatggaaccattacagatgctgtagactgtgcacttgaccctctctcagaaacaaagtgtacgttgaaatccttcactgtagaaaaaggaatctatcaaacttctaactttagagtccaaccaacagaatctattgttagatttcctaatattacaaacttgtgcccttttggtgaagtttttaacgccaccagatttgcatctgtttatgcttggaacaggaagagaatcagcaactgtgttgctgattattctgtcctatataattccgcatcattttccacttttaagtgttatggagtgtctcctactaaattaaatgatctctgctttactaatgtctatgcagattcatttgtaattagaggtgatgaagtcagacaaatcgctccagggcaaactggaaagattgctgattataattataaattaccagatgattttacaggctgcgttatagcttggaattctaacaatcttgattctaaggttggtggtaattataattacctgtatagattgtttaggaagtctaatctcaaaccttttgagagagatatttcaactgaaatctatcaggccggtagcacaccttgtaatggtgttgaaggttttaattgttactttcctttacaatcatatggtttccaacccactaatggtgttggttaccaaccatacagagtagtagtactttcttttgaacttctacatgcaccagcaactgtttgtggacctaaaaagtctactaatttggttaaaaacaaatgtgtcaatttcaacttcaatggtttaacaggcacaggtgttcttactgagtctaacaaaaagtttctgcctttccaacaatttggcagagacattgctgacactactgatgctgtccgtgatccacagacacttgagattcttgacattacaccatgttcttttggtggtgtcagtgttataacaccaggaacaaatacttctaaccaggttgctgttctttatcagggtgttaactgcacagaagtccctgttgctattcatgcagatcaacttactcctacttggcgtgtttattctacaggttctaatgtttttcaaacacgtgcaggctgtttaataggggctgaacatgtcaacaactcatatgagtgtgacatacccattggtgcaggtatatgcgctagttatcagactcagactaattctcctcggcgggcacgtagtgtagctagtcaatccatcattgcctacactatgtcacttggtgcagaaaattcagttgcttactctaataactctattgccatacccacaaattttactattagtgttaccacagaaattctaccagtgtctatgaccaagacatcagtagattgtacaatgtacatttgtggtgattcaactgaatgcagcaatcttttgttgcaatatggcagtttttgtacacaattaaaccgtgctttaactggaatagctgttgaacaagacaaaaacacccaagaagtttttgcacaagtcaaacaaatttacaaaacaccaccaattaaagattttggtggttttaatttttcacaaatattaccagatccatcaaaaccaagcaagaggtcatttattgaagatctacttttcaacaaagtgacacttgcagatgctggcttcatcaaacaatatggtgattgccttggtgatattgctgctagagacctcatttgtgcacaaaagtttaacggccttactgttttgccacctttgctcacagatgaaatgattgctcaatacacttctgcactgttagcgggtacaatcacttctggttggacctttggtgcaggtgctgcattacaaataccatttgctatgcaaatggcttataggtttaatggtattggagttacacagaatgttctctatgagaaccaaaaattgattgccaaccaatttaatagtgctattggcaaaattcaagactcactttcttccacagcaagtgcacttggaaaacttcaagatgtggtcaaccaaaatgcacaagctttaaacacgcttgttaaacaacttagctccaattttggtgcaatttcaagtgttttaaatgatatcctttcacgtcttgacaaagttgaggctgaagtgcaaattgataggttgatcacaggcagacttcaaagtttgcagacatatgtgactcaacaattaattagagctgcagaaatcagagcttctgctaatcttgctgctactaaaatgtcagagtgtgtacttggacaatcaaaaagagttgatttttgtggaaagggctatcatcttatgtccttccctcagtcagcacctcatggtgtagtcttcttgcatgtgacttatgtccctgcacaagaaaagaacttcacaactgctcctgccatttgtcatgatggaaaagcacactttcctcgtgaaggtgtctttgtttcaaatggcacacactggtttgtaacacaaaggaatttttatgaaccacaaatcattactacagacaacacatttgtgtctggtaactgtgatgttgtaataggaattgtcaacaacacagtttatgatcctttgcaacctgaattagactcattcaaggaggagttagataaatattttaagaatcatacatcaccagatgttgatttaggtgacatctctggcattaatgcttcagttgtaaacattcaaaaagaaattgaccgcctcaatgaggttgccaagaatttaaatgaatctctcatcgatctccaagaacttggaaagtatgagcagtatataaaatggccatggtacatttggctaggttttatagctggcttgattgccatagtaatggtgacaattatgctttgctgtatgaccagttgctgtagttgtctcaagggctgttgttcttgtggatcctgctgcaaatttgatgaagacgactctgagccagtgctcaaaggagtcaaattacattacacataa

SEQ ID NO: 328 - DNA, 828 bp, Severe acute respiratory syndrome coronavirus 2; identical to SEQ ID NO: 304
  source 1..828: mol_type = unassigned DNA

SEQ ID NO: 329 - DNA, 228 bp, Severe acute respiratory syndrome coronavirus 2; identical to SEQ ID NO: 305
  source 1..228: mol_type = unassigned DNA

SEQ ID NO: 330 - DNA, 186 bp, Severe acute respiratory syndrome coronavirus 2
  source 1..186: mol_type = unassigned DNA
atgtttcatctcgttgactttcaggttactatagcagagatattactaattattatgaggacttttaaagtttccatttggaatcttgattacatcacaaacctcataattaaaaatttatctaagtcactaactgagaataaatattctcaattagatgaagagcaaccaatggagattgattaa

SEQ ID NO: 331 - DNA, 366 bp, Severe acute respiratory syndrome coronavirus 2; identical to SEQ ID NO: 308
  source 1..366: mol_type = unassigned DNA

SEQ ID NO: 332 - DNA, 132 bp, Severe acute respiratory syndrome coronavirus 2; identical to SEQ ID NO: 309
  source 1..132: mol_type = unassigned DNA

SEQ ID NO: 333 - DNA, 366 bp, Severe acute respiratory syndrome coronavirus 2; identical to SEQ ID NO: 322
  source 1..366: mol_type = unassigned DNA

SEQ ID NO: 334 - DNA, 1260 bp, Severe acute respiratory syndrome coronavirus 2
  source 1..1260: mol_type = unassigned DNA
atgtctgataatggaccccaaaatcagcgaaatgcaccccgcattacgtttggtggaccctcagattcaactggcagtaaccagaatggagaacgcagtggggcgcgatcaaaacaacgtcggccccaaggtttacccaataatactgcgtcttggttcaccgctctcactcaacatggcaaggaagaccttaaattccctcgaggacaaggcgttccaattaacaccaatagcagtccagatgaccaaattggctactaccgaagagctaccagacgaattcgtggtggtgacggtaaaatgaaagatctcagtccaagatggtatttctactacctaggaactgggccagaagctggacttccctatggtgctaacaaagacggcatcatatgggttgcaactgagggagccttgaatacaccaaaagatcacattggcacccgcaatcctgctaacaatgctgcaatcgtgctacaacttcctcaaggaacaacattgccaaaaggcttctacgcagaagggagcagaggcggcagtcaagcctcttctcgttcctcatcacgtagtcgcaacagttcaagaaattcaactccaggcagcagtaaacgaacttctcctgctagaatggctggcaatggcggtgatgctgctcttgctttgctgctgcttgacagattgaaccagcttgagagtaaaatgtctggtaaaggccaacaacaacaaggccaaactgtcactaagaaatctgctgctgaggcttctaagaagcctcggcaaaaacgtactgccactaaagcatacaatgtaacacaagctttcggcagacgtggtccagaacaaacccaaggaaattttggggaccaggaactaaccagacaaggaactgattacaaacattggccgcaaattgcacaatttgcccccagcgcttcagcgttcttcggaatgtcgcgcattggcatggaagtcacaccttcgggaacgtggttgacctacacaggtgccatcaaattggatgacaaagatccaaatttcaaagatcaagtcattttgctgaataagcatattgacgcatacaaaacattcccaccaacagagcctaaaaaggacaaaaagaagaaggctgatgaaactcaagccttaccgcagagacagaagaaacagcaaactgtgactcttcttcctgctgcagatttggatgatttctccaaacaattgcaacaatccatgagcagtgctgactcaactcaggcctaa

SEQ ID NO: 335 - DNA, 117 bp, Severe acute respiratory syndrome coronavirus 2; identical to SEQ ID NO: 312
  source 1..117: mol_type = unassigned DNA

SEQ ID NO: 336 - DNA, 21291 bp, Severe acute respiratory syndrome coronavirus 2
  source 1..21291: mol_type = unassigned DNA
  misc_difference 20906: note = modified_base - a, c, t, g, unknown or other
  misc_difference 20907: note = modified_base - a, c, t, g, unknown or other
  misc_difference 20908: note = modified_base - a, c, t, g, unknown or other
  misc_difference 20909: note = modified_base - a, c, t, g, unknown or other
  misc_difference 20910: note = modified_base - a, c, t, g, unknown or other
  misc_difference 20911: note = modified_base - a, c, t, g, unknown or other
  misc_difference 20912: note = modified_base - a, c, t, g, unknown or other
  misc_difference 20913: note = modified_base - a, c, t, g, unknown or other
  misc_difference 20914: note = modified_base - a, c, t, g, unknown or other
  misc_difference 20915: note = modified_base - a, c, t, g, unknown or other
  misc_difference 20939: note = modified_base - a, c, t, g, unknown or other
  misc_difference 20940: note = modified_base - a, c, t, g, unknown or other
  misc_difference 20952: note = modified_base - a, c, t, g, unknown or other
  misc_difference 20953: note = modified_base - a, c, t, g, unknown or other
  misc_difference 20954: note = modified_base - a, c, t, g, unknown or other
  misc_difference 20955: note = modified_base - a, c, t, g, unknown or other
  misc_difference 20956: note = modified_base - a, c, t, g, unknown or other
  misc_difference 20957: note = modified_base - a, c, t, g, unknown or other
  misc_difference 20958: note = modified_base - a, c, t, g, unknown or other
  misc_difference 20959: note = modified_base - a, c, t, g, unknown or other
  misc_difference 20960: note = modified_base - a, c, t, g, unknown or other
  misc_difference 20961: note = modified_base - a, c, t, g, unknown or other
  misc_difference 20962: note = modified_base - a, c, t, g, unknown or other
  misc_difference 20963: note = modified_base - a, c, t, g, unknown or other
  misc_difference 20964: note = modified_base - a, c, t, g, unknown or other
  misc_difference 20965: note = modified_base - a, c, t, g, unknown or other
  misc_difference 20966: note = modified_base - a, c, t, g, unknown or other
  misc_difference 20967: note = modified_base - a, c, t, g, unknown or other
  misc_difference 20968: note = modified_base - a, c, t, g, unknown or other
  misc_difference 20970: note = modified_base - a, c, t, g, unknown or other
  misc_difference 20971: note = modified_base - a, c, t, g, unknown or other
  misc_difference 20972: note = modified_base - a, c, t, g, unknown or other
  misc_difference 20973: note = modified_base - a, c, t, g, unknown or other
  misc_difference 20974: note = modified_base - a, c, t, g, unknown or other
  misc_difference 20976: note = modified_base - a, c, t, g, unknown or other
  misc_difference 20977: note = modified_base - a, c, t, g, unknown or other
  misc_difference 20978: note = modified_base - a, c, t, g, unknown or other
  misc_difference 20979: note = modified_base - a, c, t, g, unknown or other
  misc_difference 20980: note = modified_base - a, c, t, g, unknown or other
  misc_difference 20981: note = modified_base - a, c, t, g, unknown or other
  misc_difference 20982: note = modified_base - a, c, t, g, unknown or other
  misc_difference 20983: note = modified_base - a, c, t, g, unknown or other
  misc_difference 20984: note = modified_base - a, c, t, g, unknown or other
  misc_difference 20985: note = modified_base - a, c, t, g, unknown or other
  misc_difference 21005: note = modified_base - a, c, t, g, unknown or other
  misc_difference 21006: note = modified_base - a, c, t, g, unknown or other
  misc_difference 21007: note = modified_base - a, c, t, g, unknown or other
  misc_difference 21008: note = modified_base - a, c, t, g, unknown or other
  misc_difference 21009: note = modified_base - a, c, t, g, unknown or other
  misc_difference 21010: note = modified_base - a, c, t, g, unknown or other
  misc_difference 21011: note = modified_base - a, c, t, g, unknown or other
  misc_difference 21012: note = modified_base - a, c, t, g, unknown or other
  misc_difference 21013: note = modified_base - a, c, t, g, unknown or other
  misc_difference 21014: note = modified_base - a, c, t, g, unknown or other
  misc_difference 21015: note = modified_base - a, c, t, g, unknown or other
  misc_difference 21016: note = modified_base - a, c, t, g, unknown or other
  misc_difference 21017: note = modified_base - a, c, t, g, unknown or other
  misc_difference 21018: note = modified_base - a, c, t, g, unknown or other
  misc_difference 21022: note = modified_base - a, c, t, g, unknown or other
  misc_difference 21023: note = modified_base - a, c, t, g, unknown or other
  misc_difference 21024: note = modified_base - a, c, t, g, unknown or other
  misc_difference 21025: note = modified_base - a, c, t, g, unknown or other
  misc_difference 21026: note = modified_base - a, c, t, g, unknown or other
  misc_difference 21027: note = modified_base - a, c, t, g, unknown or other
  misc_difference 21028: note = modified_base - a, c, t, g, unknown or other
  misc_difference 21029: note = modified_base - a, c, t, g, unknown or other
  misc_difference 21030: note = modified_base - a, c, t, g, unknown or other
  misc_difference 21052: note = modified_base - a, c, t, g, unknown or other
  misc_difference 21053: note = modified_base - a, c, t, g, unknown or other
  misc_difference 21054: note = modified_base - a, c, t, g, unknown or other
  misc_difference 21055: note = modified_base - a, c, t, g, unknown or other
  misc_difference 21056: note = modified_base - a, c, t, g, unknown or other
  misc_difference 21057: note = modified_base - a, c, t, g, unknown or other
  misc_difference 21058: note = modified_base - a, c, t, g, unknown or other
  misc_difference 21062: note = modified_base - a, c, t, g, unknown or other
  misc_difference 21063: note = modified_base - a, c, t, g, unknown or other
  misc_difference 21064: note = modified_base - a, c, t, g, unknown or other
  misc_difference 21065: note = modified_base - a, c, t, g, unknown or other
  misc_difference 21066: note = modified_base - a, c, t, g, unknown or other
  misc_difference 21067: note = modified_base - a, c, t, g, unknown or other
  misc_difference 21068: note = modified_base - a, c, t, g, unknown or other
  misc_difference 21069: note = modified_base - a, c, t, g, unknown or other
  misc_difference 21070: note = modified_base - a, c, t, g, unknown or other
  misc_difference 21071: note = modified_base - a, c, t, g, unknown or other
  misc_difference 21072: note = modified_base - a, c, t, g, unknown or other
  misc_difference 21073: note = modified_base - a, c, t, g, unknown or other
  misc_difference 21074: note = modified_base - a, c, t, g, unknown or other
  misc_difference 21075: note = modified_base - a, c, t, g, unknown or other
  misc_difference 21076: note = modified_base - a, c, t, g, unknown or other
  misc_difference 21077: note = modified_base - a, c, t, g, unknown or other
  misc_difference 21078: note = modified_base - a, c, t, g, unknown or other
  misc_difference 21079: note = modified_base - a, c, t, g, unknown or other
  misc_difference 21080: note = modified_base - a, c, t, g, unknown or other
  misc_difference 21081: note = modified_base - a, c, t, g, unknown or other
  misc_difference 21082: note = modified_base - a, c, t, g, unknown or other
  misc_difference 21083: note = modified_base - a, c, t, g, unknown or other
  misc_difference 21084: note = modified_base - a, c, t, g, unknown or other
  misc_difference 21085: note = modified_base - a, c, t, g, unknown or other
  misc_difference 21086: note = modified_base - a, c, t, g, unknown or other
  misc_difference 21087: note = modified_base - a, c, t, g, unknown or other
  misc_difference 21088: note = modified_base - a, c, t, g, unknown or other
  misc_difference 21089: note = modified_base - a, c, t, g, unknown or other
  misc_difference 21090: note = modified_base - a, c, t, g, unknown or other
  misc_difference 21091: note = modified_base - a, c, t, g, unknown or other
  misc_difference 21092: note = modified_base - a, c, t, g, unknown or other
  misc_difference 21093: note = modified_base - a, c, t, g, unknown or other
atggagagccttgtccctggtttcaacgagaaaacacacgtccaactcagtttgcctgttttacaggttcgcgacgtgctcgtacgtggctttggagactccgtggaggaggtcttatcagaggcacgtcaacatcttaaagatggcacttgtggcttagtagaagttgaaaaaggcgttttgcctcaacttgaacagccctatgtgttcatcaaacgttcggatgctcgaactgcacctcatggtcatgttatggttgagctggtagcagaactcgaaggcattcagtacggtcgtagtggtgagacacttggtgtccttgtccctcatgtgggcgaaataccagtggcttaccgcaaggttcttcttcgtaagaacggtaataaaggagctggtggccatagttacggcgccgatctaaagtcatttgacttaggcgacgagcttggcactgatccttatgaagattttcaagaaaactggaacactaaacatagcagtggtgttacccgtgaactcatgcgtgagcttaacggaggggcatacactcgctatgtcgataacaacttctgtggccctgatggctaccctcttgagtgcattaaagaccttctagcacgtgctggtaaagcttcatgcactttgtccgaacaactggactttattgacactaagaggggtgtatactgctgccgtgaacatgagcatgaaattgcttggtacacggaacgttctgaaaagagctatgaattgcagacaccttttgaaattaaattggcaaagaaatttgacatcttcaatggggaatgtccaaattttgtatttcccttaaattccataatcaagactattcaaccaagggttgaaaagaaaaagcttgatggctttatgggtagaattcgatccgtctatccagttgcgtcaccaaatgaatgcaaccaaatgtgcctttcaactctcatgaagtgtgatcattgtggtgaaacttcatggcagacgggcgattttgttaaagccacttgcgaattttgtggcactgagaatttgactaaagaaggtgccactacttgtggttacttaacccaaaatgctgttgttaaaatttattgtccagcatgtcacaattcagaagtaggacctgagcatagtcttgccgaataccataatgaatctggcttgaaaaccattcttcgtaagggtggtcgcactattgcctttggaggctgtgtgttctcttatgttggttgccataacaagtgtgcctattgggttccacgtgctagcgctaacataggttgtaaccatacaggtgttgttggagaaggttccgaaggtcttaatgacaaccttcttgaaatactccaaaaagagaaagtcaacatcaatattgttggtgactttaaacttaatgaagagatcgccattattttggcatctttttctgcttccacaagtgcttttgtggaaactgtgaaaggtttggattataaagcattcaaacaaattgttgaatcctgtggtaattttaaagttacaaaaggaaaagctaaaaaaggtgcctggaatattggtgaacagaaatcaatactgagtcctctttatgcatttgcatcagaggctgctcgtgttgtacgatcaattttctcccgcactcttgaaactgctcaaaattctgtgcgtgttttacagaaggccgctataacaatactagatggaatttcacagtattcactgagactcattgatgctatgatgttcacatctgatttggctactaacaatctagttgtaatggcctacattacaggtggtgttgttcagttgacttcgcagtggctaactaacatctttggcactgtttatgaaaaactcaaacccgtccttgattggcttgaagagaagtttaaggaaggtgtagagtttcttagagacggttgggaaattgttaaatttatctcaacctgtgcttgtgaaattgtcggtggacaaattgtcacctgtgcaaaggaaattaaggagagtgttcagacattctttaagcttgtaaataaatttttggctttgtgtgctgactctatcattattggtggagctaaacttaaagccttgaatttaggtgaaacatttgtcacgcactcaaagggattgtacagaaagtgtgttaaatccagagaagaaactggcctactcatgcctctaaaagccccaaaagaaattatcttcttagagggagaaacacttcccacagaagtgttaacagaggaagttgtcttgaaaactggtgatttacaaccattagaacaacctactagtgaagctgttgaagctccattggttggtacaccagtttgtattaacgggcttatgttgctcgaaatcaaagacacagaaaagtactgtgcccttgcacctaatatgatggtaacaaacaataccttcacactcaaaggcggtgcaccaacaaaggttacttttggtgatgacactgtgatagaagtgcaaggttacaagagtgtgaatatcacttttgaacttgatgaaaggattgataaagtacttaatgagaagtgctctgcctatacagttgaactcggtacagaagtaaatgagttcgcctgtgttgtggcagatgctgtcataaaaactttgcaaccagtatctgaattacttacaccactgggcattgatttagatgagtggagtatggctacatactacttatttgatgagtctggtgagtttaaattggcttcacatatgtattgttctttttaccctccagatgaggatgaagaagaaggtgattgtgaagaagaagagtttgagccatcaactcaatatgagtatggtactgaagatgattaccaaggtaaacctttggaatttggtgccacttctgctgctcttcaacctgaagaagagcaagaagaagattggttagatgatgatagtcaacaaactgttggtcaacaagacggcagtgaggacaatcagacaactactattcaaacaattgttgaggttcaacctcaattagagatggaacttacaccagttgttcagactattgaagtgaatagttttagtggttatttaaaacttactgacaatgtatacattaaaaatgcagacattgtggaagaagctaaaaaggtaaaaccaacagtggttgttaatgcagccaatgtttaccttaaacatggaggaggtgttgcaggagccttaaataaggctactaacaatgccatgcaagttgaatctgatgattacatagctactaatggaccacttaaagtgggtggtagttgtgttttaagcggacacaatcttgctaaacactgtcttcatgttgtcggcccaaatgttaacaaaggtgaagacattcaacttcttaagagtgcttatgaaaattttaatcagcacgaagttctacttgcaccattattatcagctggtatttttggtgctgaccctatacattctttaagagtttgtgtagatactgttcgcacaaatgtctacttagctgtctttgataaaaatctctatgacaaacttgtttcaagctttttggaaatgaagagtgaaaagcaagttgaacaaaagatcgctgagattcctaaagaggaagttaagccatttataactgaaagtaaaccttcagttgaacagagaaaacaagatgataagaaaatcaaagcttgtgttgaagaagttacaacaactctggaagaaactaagttcctcacagaaaacttgttactttatattgacattaatggcaatcttcatccagattctgccactcttgttagtgacattgacatcactttcttaaagaaagatgctccatatatagtgggtgatgttgttcaagagggtgttttaactgctgtggttatacctactaaaaaggctggtggcactactgaaatgctagcgaaagctttgagaaaagtgccaacagacaattatataaccacttacccgggtcagggtttaaatggttacactgtagaggaggcaaagacagtgcttaaaaagtgtaaaagtgccttttacattctaccatctattatctctaatgagaagcaagaaattcttggaactgtttcttggaatttgcgagaaatgcttgcacatgcagaagaaacacgcaaattaatgcctgtctgtgtggaaactaaagccatagtttcaactatacagcgtaaatataagggtattaaaatacaagagggtgtggttgattatggtgctagattttacttttacaccagtaaaacaactgtagcgtcacttatcaacacacttaacgatctaaatgaaactcttgttacaatgccacttggctatgtaacacatggcttaaatttggaagaagctgctcggtatatgagatctctcaaagtgccagctacagtttctgtttcttcacctgatgctgttacagcgtataatggttatcttacttcttcttctaaaacacctgaagaacattttattgaaaccatctcacttgctggttcctataaagattggtcctattctggacaatctacacaactaggtatagaatttcttaagagaggtgataaaagtgtatattacactagtaatcctaccacattccacctagatggtgaagttatcacctttgacaatcttaagacacttctttctttgagagaagtgaggactattaaggtgtttacaacagtagacaacattaacctccacacgcaagttgtggacatgtcaatgacatatggacaacagtttggtccaacttatttggatggagctgatgttactaaaataaaacctcataattcacatgaaggtaaaacattttatgttttacctaatgatgacactctacgtgttgaggcttttgagtactaccacacaactgatcctagttttctgggtaggtacatgtcagcattaaatcacactaaaaagtggaaatacccacaagttaatggtttaacttctattaaatgggcagataacaactgttatcttgccactgcattgttaacactccaacaaatagagttgaagtttaatccacctgctctacaagatgcttattacagagcaagggctggtgaagctgctaacttttgtgcacttatcttagcctactgtaataagacagtaggtgagttaggtgatgttagagaaacaatgagttacttgtttcaacatgccaatttagattcttgcaaaagagtcttgaacgtggtgtgtaaaacttgtggacaacagcagacaacccttaagggtgtagaagctgttatgtacatgggcacactttcttatgaacaatttaagaaaggtgttcagataccttgtacgtgtggtaaacaagctacaaaatatctagtacaacaggagtcaccttttgttatgatgtcagcaccacctgctcagtatgaacttaagcatggtacatttacttgtgctagtgagtacgctggtaattaccagtgtggtcactataaacatataacttctaaagaaactttgtattgcatagacggtgctttacttacaaagtcctcagaatacaaaggtcctattacggatgttttctacaaagaaaacagttacacaacaaccataaaaccagttacttataaattggatggtgttgtttgtacagaaattgaccctaagttggacaattattataagaaagacaattcttatttcacagagcaaccaattgatcttgtaccaaaccaaccatatccaaacgcaagcttcgataattttaagtttgtatgtgataatatcaaatttgctgatgatttaaaccagttaactggttataagaaacctgcttcaagagagcttaaagttacatttttccctgacttaaatggtgatgtggtggctattgattataaacactacacaccctcttttaagaaaggagctaaattgttacataaacctattgtttggcatgttaacaatgcaactaataaagccacgtataaaccaaatacctggtgtatacgttgtctttggagcacaaaaccagttgaaacatcaaattcgtttgatgtactgaagtcagaggacgcgcagggaatggataatcttgcctgcgaagatctaaaaccagtctctgaagaagtagtggaaaatcctaccatacagaaagacgttcttgagtgtaatgtgaaaactaccgaagttgtaggagacattatacttaaaccagcaaataatagtttaaaaattacagaagaggttggccacacagatctaatggctgcttatgtagacaattctagtcttactattaagaaacctaatgaattatctagagtattaggtttgaaaacccttgctactcatggtttagctgctgttaatagtgtcccttgggatactatagctaattatgctaagccttttcttaacaaagttgttagtacaactactaacatagttacacggtgtttaaaccgtgtttgtactaattatatgccttatttctttactttattgctacaattgtgtacttttactagaagtacaaattctagaattaaagcatctatgccgactactatagcaaagaatactgttaagagtgtcggtaaattttgtctagaggcttcatttaattatttgaagtcacctaatttttctaaactgataaatattataatttggtttttactattaagtgtttgcctaggttctttaatctactcaaccgctgctttaggtgttttaatgtctaatttaggcatgccttcttactgtactggttacagagaaggctatttgaactctactaatgtcactattgcaacctactgtactggttctataccttgtagtgtttgtcttagtggtttagattctttagacacctatccttctttagaaactatacaaattaccatttcatcttttaaatgggatttaactgcttttggcttagttgcagagtggtttttggcatatattcttttcactaggtttttctatgtacttggattggctgcaatcatgcaattgtttttcagctattttgcagtacattttattagtaattcttggcttatgtggttaataattaatcttgtacaaatggccccgatttcagctatggttagaatgtacatcttctttgcatcattttattatgtatggaaaagttatgtgcatgttgtagacggttgtaattcatcaacttgtatgatgtgttacaaacgtaatagagcaacaagagtcgaatgtacaactattgttaatggtgttagaaggtccttttatgtctatgctaatggaggtaaaggcttttgcaaactacacaattggaattgtgttaattgtgatacattctgtgctggtagtacatttattagtgatgaagttgcgagagacttgtcactacagtttaaaagaccaataaatcctactgaccagtcttcttacatcgttgatagtgttacagtgaagaatggttccatccatctttactttgataaagctggtcaaaagacttatgaaagacattctctctctcattttgttaacttagacaacctgagagctaataacactaaaggttcattgcctattaatgttatagtttttgatggtaaatcaaaatgtgaagaatcatctgcaaaatcagcgtctgtttactacagtcagcttatgtgtcaacctatactgttactagatcaggcattagtgtctgatgttggtgatagtgcggaagttgcagttaaaatgtttgatgcttacgttaatacgttttcatcaacttttaacgtaccaatggaaaaactcaaaacactagttgcaactgcagaagctgaacttgcaaagaatgtgtccttagacaatgtcttatctacttttatttcagcagctcggcaagggtttgttgattcagatgtagaaactaaagatgttgttgaatgtcttaaattgtcacatcaatctgacatagaagttactggcgatagttgtaataactatatgctcacctataacaaagttgaaaacatgacaccccgtgaccttggtgcttgtattgactgtagtgcgcgtcatattaatgcgcaggtagcaaaaagtcacaacattgctttgatatggaacgttaaagatttcatgtcattgtctgaacaactacgaaaacaaatacgtagtgctgctaaaaagaataacttaccttttaagttgacatgtgcaactactagacaagttgttaatgttgtaacaacaaagatagcacttaagggtggtaaaattgttaataattggttgaagcagttaattaaagttacacttgtgttcctttttgttgctgctattttctatttaataacacctgttcatgtcatgtctaaacatactgacttttcaagtgaaatcataggatacaaggctattgatggtggtgtcactcgtgacatagcatctacagatacttgttttgctaacaaacatgctgattttgacacatggtttagccagcgtggtggtagttatactaatgacaaagcttgcccattgattgctgcagtcataacaagagaagtgggttttgtcgtgcctggtttgcctggcacgatattacgcacaactaatggtgactttttgcatttcttacctagagtttttagtgcagttggtaacatctgttacacaccatcaaaacttatagagtacactgactttgcaacatcagcttgtgttttggctgctgaatgtacaatttttaaagatgcttctggtaagccagtaccatattgttatgataccaatgtactagaaggttctgttgcttatgaaagtttacgccctgacacacgttatgtgctcatggatggctctattattcaatttcctaacacctaccttgaaggttctgttagagtggtaacaacttttgattctgagtactgtaggcacggcacttgtgaaagatcagaagctggtgtttgtgtatctactagtggtagatgggtacttaacaatgattattacagatctttaccaggagttttctgtggtgtagatgctgtaaatttacttactaatatgtttacaccactaattcaacctattggtgctttggacatatcagcatctatagtagctggtggtattgtagctatcgtagtaacatgccttgcctactattttatgaggtttagaagagcttttggtgaatacagtcatgtagttgcctttaatactttactattccttatgtcattcactgtactctgtttaacaccagtttactcattcttacctggtgtttattctgttatttacttgtacttgacattttatcttactaatgatgtttcttttttagcacatattcagtggatggttatgttcacacctttagtacctttctggataacaattgcttatatcatttgtatttccacaaagcatttctattggttctttagtaattacctaaagagacgtgtagtctttaatggtgtttcctttagtacttttgaagaagctgcgctgtgcacctttttgttaaataaagaaatgtatctaaagttgcgtagtgatgtgctattacctcttacgcaatataatagatacttagctctttataataagtacaagtattttagtggagcaatggatacaactagctacagagaagctgcttgttgtcatctcgcaaaggctctcaatgacttcagtaactcaggttctgatgttctttaccaaccaccacaaacctctatcacctcagctgttttgcagagtggttttagaaaaatggcattcccatctggtaaagttgagggttgtatggtacaagtaacttgtggtacaactacacttaacggtctttggcttgatgacgtagtttactgtccaagacatgtgatctgcacctctgaagacatgcttaaccctaattatgaagatttactcattcgtaagtctaatcataatttcttggtacaggctggtaatgttcaactcagggttattggacattctatgcaaaattgtgtacttaagcttaaggttgatacagccaatcctaagacacctaagtataagtttgttcgcattcaaccaggacagactttttcagtgttagcttgttacaatggttcaccatctggtgtttaccaatgtgctatgaggcccaatttcactattaagggttcattccttaatggttcatgtggtagtgttggttttaacatagattatgactgtgtctctttttgttacatgcaccatatggaattaccaactggagttcatgctggcacagacttagaaggtaacttttatggaccttttgttgacaggcaaacagcacaagcagctggtacggacacaactattacagttaatgttttagcttggttgtacgctgctgttataaatggagacaggtggtttctcaatcgatttaccacaactcttaatgactttaaccttgtggctatgaagtacaattatgaacctctaacacaagatcatgttgacatactaggacctctttctgctcaaactggaattgccgttttagatatgtgtgcttcattaaaagaattactgcaaaatggtatgaatggacgtaccatattgggtagtgctttattagaagatgaatttacaccttttgatgttgttagacaatgctcaggtgttactttccaaagtgcagtgaaaagaacaatcaagggtacacaccactggttgttactcacaattttgacttcacttttagttttagtccagagtactcaatggtctttgttcttttttttgtatgaaaatgcctttttaccttttgctatgggtattattgctatgtctgcttttgcaatgatgtttgtcaaacataagcatgcatttctctgtttgtttttgttaccttctcttgccactgtagcttattttaatatggtctatatgcctgctagttgggtgatgcgtattatgacatggttggatatggttgatactagtttgtctggttttaagctaaaagactgtgttatgtatgcatcagctgtagtgttactaatccttatgacagcaagaactgtgtatgatgatggtgctaggagagtgtggacacttatgaatgtcttgacactcgtttataaagtttattatggtaatgctttagatcaagccatttccatgtgggctcttataatctctgttacttctaactactcaggtgtagttacaactgtcatgtttttggccagaggtattgtttttatgtgtgttgagtattgccctattttcttcataactggtaatacacttcagtgtataatgctagtttattgtttcttaggctatttttgtacttgttactttggcctcttttgtttactcaaccgctactttagactgactcttggtgtttatgattacttagtttctacacaggagtttagatatatgaattcacagggactactcccacccaagaatagcatagatgccttcaaactcaacattaaattgttgggtgttggtggcaaaccttgtatcaaagtagccactgtacagtctaaaatgtcagatgtaaagtgcacatcagtagtcttactctcagttttgcaacaactcagagtagaatcatcatctaaattgtgggctcaatgtgtccagttacacaatgacattctcttagctaaagatactactgaagcctttgaaaaaatggtttcactactttctgttttgctttccatgcagggtgctgtagacataaacaagctttgtgaagaaatgctggacaacagggcaaccttacaagctatagcctcagagtttagttcccttccatcatatgcagcttttgctactgctcaagaagcttatgagcaggctgttgctaatggtgattctgaagttgttcttaaaaagttgaagaagtctttgaatgtggctaaatctgaatttgaccgtgatgcagccatgcaacgtaagttggaaaagatggctgatcaagctatgacccaaatgtataaacaggctagatctgaggacaagagggcaaaagttactagtgctatgcagacaatgcttttcactatgcttagaaagttggataatgatgcactcaacaacattatcaacaatgcaagagatggttgtgttcccttgaacataatacctcttacaacagcagccaaactaatggttgtcataccagactataacacatataaaaatacgtgtgatggtacaacatttacttatgcatcagcattgtgggaaatccaacaggttgtagatgcagatagtaaaattgttcaacttagtgaaattagtatggacaattcacctaatttagcatggcctcttattgtaacagctttaagggccaattctgctgtcaaattacagaataatgagcttagtcctgttgcactacgacagatgtcttgtgctgccggtactacacaaactgcttgcactgatgacaatgcgttagcttactacaacacaacaaagggaggtaggtttgtacttgcactgttatccgatttacaggatttgaaatgggctagattccctaagagtgatggaactggtactatctatacagaactggaaccaccttgtaggtttgttacagacacacctaaaggtcctaaagtgaagtatttatactttattaaaggattaaacaacctaaatagaggtatggtacttggtagtttagctgccacagtacgtctacaagctggtaatgcaacagaagtgcctgccaattcaactgtattatctttctgtgcttttgctgtagatgctgctaaagcttacaaagattatctagctagtgggggacaaccaatcactaattgtgttaagatgttgtgtacacacactggtactggtcaggcaataacagttacaccggaagccaatatggatcaagaatcctttggtggtgcatcgtgttgtctgtactgccgttgccacatagatcatccaaatcctaaaggattttgtgacttaaaaggtaagtatgtacaaatacctacaacttgtgttaatgaccctgtgggttttacacttaaaaacacagtctgtaccgtctgcggtatgtggaaaggttatggctgtagttgtgatcaactccgcgaacccatgcttcagtcagctgatgcacaatcgtttttaaaccgggtttgcggtgtaagtgcagcccgtcttacaccgtgcggcacaggcactagtactgatgtcgtatacagggcttttgacatctacaatgataaagtagctggttttgctaaattcctaaaaactaattgttgtcgcttccaagaaaaggacgaagatgacaatttaattgattcttactttgtagttaagagacacactttctctaactaccaacatgaagaaacaatttataatttacttaaggattgtccagctgttgctaaacatgacttctttaagtttagaatagacggtgacatggtaccacatatatcacgtcaacgtcttactaaatacacaatggcagacctcgtctatgctttaaggcattttgatgaaggtaattgtgacacattaaaagaaatacttgtcacatacaattgttgtgatgatgattatttcaataaaaaggactggtatgattttgtagaaaacccagatatattacgcgtatacgccaacttaggtgaacgtgtacgccaagctttgttaaaaacagtacaattctgtgatgccatgcgaaatgctggtattgttggtgtactgacattagataatcaagatctcaatggtaactggtatgatttcggtgatttcatacaaaccacgccaggtagtggagttcctgttgtagattcttattattcattgttaatgcctatattaaccttgaccagggctttaactgcagagtcacatgttgacactgacttaacaaagccttacattaagtgggatttgttaaaatatgacttcacggaagagaggttaaaactctttgaccgttattttaaatattgggatcagacataccacccaaattgtgttaactgtttggatgacagatgcattctgcattgtgcaaactttaatgttttattctctacagtgttcccacttacaagttttggaccactagtgagaaaaatatttgttgatggtgttccatttgtagtttcaactggataccacttcagagagctaggtgttgtacataatcaggatgtaaacttacatagctctagacttagttttaaggaattacttgtgtatgctgctgaccctgctatgcacgctgcttctggtaatctattactagataaacgcactacgtgcttttcagtagctgcacttactaacaatgttgcttttcaaactgtcaaacccggtaattttaacaaagacttctatgactttgctgtgtctaagggtttctttaaggaaggaagttctgttgaattaaaacacttcttctttgctcaggatggtaatgctgctatcagcgattatgactactatcgttataatctaccaacaatgtgtgatatcagacaactactatttgtagttgaagttgttgataagtactttgattgttacgatggtggctgtattaatgctaaccaagtcatcgtcaacaacctagacaaatcagctggttttccatttaataaatggggtaaggctagactttattatgattcaatgagttatgaggatcaagatgcacttttcgcatatacaaaacgtaatgtcatccctactataactcaaatgaatcttaagtatgccattagtgcaaagaatagagctcgcaccgtagctggtgtctctatctgtagtactatgaccaatagacagtttcatcaaaaattattgaaatcaatagccgccactagaggagctactgtagtaattggaacaagcaaattctatggtggttggcacaacatgttaaaaactgtttatagtgatgtagaaaaccctcaccttatgggttgggattatcctaaatgtgatagagccatgcctaacatgcttagaattatggcctcacttgttcttgctcgcaaacatacaacgtgttgtagcttgtcacaccgtttctatagattagctaatgagtgtgctcaagtattgagtgaaatggtcatgtgtggcggttcactatatgttaaaccaggtggaacctcatcaggagatgccacaactgcttatgctaatagtgtttttaacatttgtcaagctgtcacggccaatgttaatgcacttttatctactgatggtaacaaaattgccgataagtatgtccgcaatttacaacacagactttatgagtgtctctatagaaatagagatgttgacacagactttgtgaatgagttttacgcatatttgcgtaaacatttctcaatgatgatactctctgacgatgctgttgtgtgtttcaatagcacttatgcatctcaaggtctagtggctagcataaagaactttaagtcagttctttattatcaaaacaatgtttttatgtctgaagcaaaatgttggactgagactgaccttactaaaggacctcatgaattttgctctcaacatacaatgctagttaaacagggtgatgattatgtgtaccttccttacccagatccatcaagaatcctaggggccggctgttttgtagatgatatcgtaaaaacagatggtacacttatgattgaacggttcgtgtctttagctatagatgcttacccacttactaaacatcctaatcaggagtatgctgatgtctttcatttgtacttacaatacataagaaagctacatgatgagttaacaggacacatgttagacatgtattctgttatgcttactaatgataacacttcaaggtattgggaacctgagttttatgaggctatgtacacaccgcatacagtcttacaggctgttggggcttgtgttctttgcaattcacagacttcattaagatgtggtgcttgcatacgtagaccattcttatgttgtaaatgctgttacgaccatgtcatatcaacatcacataaattagtcttgtctgttaatccgtatgtttgcaatgctccaggttgtgatgtcacagatgtgactcaactttacttaggaggtatgagctattattgtaaatcacataaaccacccattagttttccattgtgtgctaatggacaagtttttggtttatataaaaatacatgtgttggtagcgataatgttactgactttaatgcaattgcaacatgtgactggacaaatgctggtgattacattttagctaacacctgtactgaaagactcaagctttttgcagcagaaacgctcaaagctactgaggagacatttaaactgtcttatggtattgctactgtacgtgaagtgctgtctgacagagaattacatctttcatgggaagttggtaaacctagaccaccacttaaccgaaattatgtctttactggttatcgtgtaactaaaaacagtaaagtacaaataggagagtacacctttgaaaaaggtgactatggtgatgctgttgtttaccgaggtacaacaacttacaaattaaatgttggtgattattttgtgctgacatcacatacagtaatgccattaagtgcacctacactagtgccacaagagcactatgttagaattactggcttatacccaacactcaatatctcagatgagttttctagcaatgttgcaaattatcaaaaggttggtatgcaaaagtattctacactccagggaccacctggtactggtaagagtcattttgctattggcctagctctctactacccttctgctcgcatagtgtatacagcttgctctcatgccgctgttgatgcactatgtgagaaggcattaaaatatttgcctatagataaatgtagtagaattatacctgcacgtgctcgtgtagattgttttgataaattcaaagtgaattcaacattagaacagtatgtcttttgtactgtaaatgcattgcctgagacgacagcagatatagttgtctttgatgaaatttcaatggccacaaattatgatttgagtgttgtcaatgccagattacgtgctaagcactatgtgtacattggcgaccctgctcaattacctgcaccacgcacattgctaactaagggcacactagaaccagaatatttcaattcagtgtgtagacttatgaaaactataggtccagacatgttcctcggaacttgtcggcgttgtcctgctgaaattgttgacactgtgagtgctttggtttatgataataagcttaaagcacataaagacaaatcagctcaatgctttaaaatgttttataagggtgttatcacgcatgatgtttcatctgcaattaacaggccacaaataggcgtggtaagagaattccttacacgtaaccctgcttggagaaaagctgtctttatttcaccttataattcacagaatgctgtagcctcaaagattttgggactaccaactcaaactgttgattcatcacagggctcagaatatgactatgtcatattcactcaaaccactgaaacagctcactcttgtaatgtaaacagatttaatgttgctattaccagagcaaaagtaggcatactttgcataatgtctgatagagacctttatgacaagttgcaatttacaagtcttgaaattccacgtaggaatgtggcaactttacaagctgaaaatgtaacaggactctttaaagattgtagtaaggtaatcactgggttacatcctacacaggcacctacacacctcagtgttgacactaaattcaaaactgaaggtttatgtgttgacatacctggcatacctaaggacatgacctatagaagactcatctctatgatgggttttaaaatgaattatcaagttaatggttaccctaacatgtttatcacccgcgaagaagctataagacatgtacgtgcatggattggcttcgatgtcgaggggtgtcatgctactagagaagctgttggtaccaatttacctttacagctaggtttttctacaggtgttaacctagttgctgtacctacaggttatgttgatacacctaataatacagatttttccagagttagtgctaaaccaccgcctggagatcaatttaaacacctcataccacttatgtacaaaggacttccttggaatgtagtgcgtataaagattgtacaaatgttaagtgacacacttagaaatctctctgacagagtcgtatttgtcttatgggcacatggctttgagttgacatctatgaagtattttgtgaaaataggacctgagcgcacctgttgtctatgtgatagacgtgccacatgcttttccactgcttcagacacttatgcctgttggcatcattctattggatttgattacgtctataatccgtttatgattgatgttcaacaatggggttttacaggtaacctacaaagcaaccatgatctgtattgtcaagtccatggtaatgcacatgtagctagttgtgatgcaatcatgactaggtgtctagctgtccacgagtgctttgttaagcgtgttgactggactattgaatatcctataattggtgatgaactgaagattaatgcggcttgtagaaaggttcaacacatggttgttaaagctgcattattagcagacaaattcccagttcttcacgacattggtaaccctaaagctattaagtgtgtacctcaagctgatgtagaatggaagttctatgatgcacagccttgtagtgacaaagcttataaaatagaagaattattctattcttatgccacacattctgacaaattcacagatggtgtatgcctattttggaattgcaatgtcgatagatatcctgctaattccattgtttgtagatttgacactagagtgctatctaaccttaacttgcctggttgtgatggtggcagtttgtatgtaaataaacatgcattccacacaccagcttttgataaaagtgcttttgttaatttaaaacaattaccatttttctattactctgacagtccatgtgagtctcatggaaaacaagtagtgtcagatatagattatgtaccactaaagtctgctacgtgtataacacgttgcaatttaggtggtgctgtctgtagacatcatgctaatgagtacagattgtatctcgatgcttataacatgatgatctcagctggctttagcttgtgggtttacaaacaatttgatacttataacctctggaacacttttacaagacttcagagtttagaaaatgtggcttttaatgttgtaaataagggacactttgatggacaacagggtgaagtaccagtttctatcattaataacactgtttacacaaaagttgatggtgttgatgtagaattgtttgaaaataaaacaacattacctgttaatgtagcatttgagctttgggctaagcgcaacattaaaccagtaccagaggtgaaaatactcaataatttgggtgtggacattgctgctaatactgtgatctgggactacaaaagagatgctccagcacatatatctactattggtgtttgttctatgactgacatagccaagaaaccaactgaaacgatttgtgcaccactcactgtcttttttgatggtagagttgatggtcaagtagacttatttagaaatgcccgtaatggtgttcttattacagaaggtagtgttaaaggtttacaaccatctgtaggtcccaaacaagctagtcttaatggagtcacattaattggagaagccgtaaaaacacagttcaattattataagaaagttgatggtgttgtccaacaattacctgaaacttactttactcagagtagaaatttacaagaatttaaacccaggagtcaaatggaaattgatttcttagaattagctatggatgaattcattgaacggtataaattagaaggctatgccttcgaacatatcgtttatggagattttagtcatagtcagttaggtggtttacatctactgattggactagctaaacgttttaaggaatcaccttttgaattagaagattttattcctatggacagtacagttaaaaactatttcataacagatgcgcaaacaggttcatctaagtgtgtgtgttctgttattgatttattacttgatgattttgttgaaataataaaatcccaagatttatctgtagtttctaaggttgtcaaagtgactattgactatacagaaatttcatttatgctttggtgtaaagatggccatgtagaaacattttacccaaaattacaatctagtcaagcgtggcaaccgggtgttgctatgcctaatctttacaaaatgcaaagaatgctattagaaaagtgtgaccttcaaaattatggtgatagtgcaacattacctaaaggcataatgatgaatgtcgcaaaatatactcaactgtgtcaatatttaaacacattaacattagctgtaccctataatatgagagttatacattttggtgctggttctgataaaggagttgcaccaggtacagctgttttaagacagtggttgcctacgggtacgctgcttgtcgattcagatcttaatgactttgtctctgatgcagattcaactttgattggtgattgtgcaactgtacatacagctaataaatgggatctcattattagtgatatgtacgaccctaagactaaaaatgttacaaaagaaaatgactctaaagagggttttttcacttacatttgtgggtttatacaacaaaagctagctcttggaggttccgtggctataaagannnnnnnnnnttcttggaatgctgatctttatannctcatgggacannnnnnnnnnnnnnnnncnnnnntnnnnnnnnnnaatgcgtcatcatctgaagnnnnnnnnnnnnnntgtnnnnnnnnnggcaaaccacgcgaacaaatannnnnnnatgnnnnnnnnnnnnnnnnnnnnnnnnnnnnnnnnacaaatccaattcagttgtcttcctattctttatttgacatgagtaaatttccccttaaattaaggggtactgttgttatgtctttaaaagaaggtcaaatcaatgatatgattttatctcttcttagtaaaggtagacttataattagagaaaacaacagagttgttatttctagtgatgttcttgttaacaactaa

SEQ ID NO: 337 - DNA, 13218 bp, Severe acute respiratory syndrome coronavirus 2
  source 1..13218: mol_type = unassigned DNA
atggagagccttgtccctggtttcaacgagaaaacacacgtccaactcagtttgcctgttttacaggttcgcgacgtgctcgtacgtggctttggagactccgtggaggaggtcttatcagaggcacgtcaacatcttaaagatggcacttgtggcttagtagaagttgaaaaaggcgttttgcctcaacttgaacagccctatgtgttcatcaaacgttcggatgctcgaactgcacctcatggtcatgttatggttgagctggtagcagaactcgaaggcattcagtacggtcgtagtggtgagacacttggtgtccttgtccctcatgtgggcgaaataccagtggcttaccgcaaggttcttcttcgtaagaacggtaataaaggagctggtggccatagttacggcgccgatctaaagtcatttgacttaggcgacgagcttggcactgatccttatgaagattttcaagaaaactggaacactaaacatagcagtggtgttacccgtgaactcatgcgtgagcttaacggaggggcatacactcgctatgtcgataacaacttctgtggccctgatggctaccctcttgagtgcattaaagaccttctagcacgtgctggtaaagcttcatgcactttgtccgaacaactggactttattgacactaagaggggtgtatactgctgccgtgaacatgagcatgaaattgcttggtacacggaacgttctgaaaagagctatgaattgcagacaccttttgaaattaaattggcaaagaaatttgacatcttcaatggggaatgtccaaattttgtatttcccttaaattccataatcaagactattcaaccaagggttgaaaagaaaaagcttgatggctttatgggtagaattcgatccgtctatccagttgcgtcaccaaatgaatgcaaccaaatgtgcctttcaactctcatgaagtgtgatcattgtggtgaaacttcatggcagacgggcgattttgttaaagccacttgcgaattttgtggcactgagaatttgactaaagaaggtgccactacttgtggttacttaacccaaaatgctgttgttaaaatttattgtccagcatgtcacaattcagaagtaggacctgagcatagtcttgccgaataccataatgaatctggcttgaaaaccattcttcgtaagggtggtcgcactattgcctttggaggctgtgtgttctcttatgttggttgccataacaagtgtgcctattgggttccacgtgctagcgctaacataggttgtaaccatacaggtgttgttggagaaggttccgaaggtcttaatgacaaccttcttgaaatactccaaaaagagaaagtcaacatcaatattgttggtgactttaaacttaatgaagagatcgccattattttggcatctttttctgcttccacaagtgcttttgtggaaactgtgaaaggtttggattataaagcattcaaacaaattgttgaatcctgtggtaattttaaagttacaaaaggaaaagctaaaaaaggtgcctggaatattggtgaacagaaatcaatactgagtcctctttatgcatttgcatcagaggctgctcgtgttgtacgatcaattttctcccgcactcttgaaactgctcaaaattctgtgcgtgttttacagaaggccgctataacaatactagatggaatttcacagtattcactgagactcattgatgctatgatgttcacatctgatttggctactaacaatctagttgtaatggcctacattacaggtggtgttgttcagttgacttcgcagtggctaactaacatctttggcactgtttatgaaaaactcaaacccgtccttgattggcttgaagagaagtttaaggaaggtgtagagtttcttagagacggttgggaaattgttaaatttatctcaacctgtgcttgtgaaattgtcggtggacaaattgtcacctgtgcaaaggaaattaaggagagtgttcagacattctttaagcttgtaaataaatttttggctttgtgtgctgactctatcattattggtggagctaaacttaaagccttgaatttaggtgaaacatttgtcacgcactcaaagggattgtacagaaagtgtgttaaatccagagaagaaactggcctactcatgcctctaaaagccccaaaagaaattatcttcttagagggagaaacacttcccacagaagtgttaacagaggaagttgtcttgaaaactggtgatttacaaccattagaacaacctactagtgaagctgttgaagctccattggttggtacaccagtttgtattaacgggcttatgttgctcgaaatcaaagacacagaaaagtactgtgcccttgcacctaatatgatggtaacaaacaataccttcacactcaaaggcggtgcaccaacaaaggttacttttggtgatgacactgtgatagaagtgcaaggttacaagagtgtgaatatcacttttgaacttgatgaaaggattgataaagtacttaatgagaagtgctctgcctatacagttgaactcggtacagaagtaaatgagttcgcctgtgttgtggcagatgctgtcataaaaactttgcaaccagtatctgaattacttacaccactgggcattgatttagatgagtggagtatggctacatactacttatttgatgagtctggtgagtttaaattggcttcacatatgtattgttctttttaccctccagatgaggatgaagaagaaggtgattgtgaagaagaagagtttgagccatcaactcaatatgagtatggtactgaagatgattaccaaggtaaacctttggaatttggtgccacttctgctgctcttcaacctgaagaagagcaagaagaagattggttagatgatgatagtcaacaaactgttggtcaacaagacggcagtgaggacaatcagacaactactattcaaacaattgttgaggttcaacctcaattagagatggaacttacaccagttgttcagactattgaagtgaatagttttagtggttatttaaaacttactgacaatgtatacattaaaaatgcagacattgtggaagaagctaaaaaggtaaaaccaacagtggttgttaatgcagccaatgtttaccttaaacatggaggaggtgttgcaggagccttaaataaggctactaacaatgccatgcaagttgaatctgatgattacatagctactaatggaccacttaaagtgggtggtagttgtgttttaagcggacacaatcttgctaaacactgtcttcatgttgtcggcccaaatgttaacaaaggtgaagacattcaacttcttaagagtgcttatgaaaattttaatcagcacgaagttctacttgcaccattattatcagctggtatttttggtgctgaccctatacattctttaagagtttgtgtagatactgttcgcacaaatgtctacttagctgtctttgataaaaatctctatgacaaacttgtttcaagctttttggaaatgaagagtgaaaagcaagttgaacaaaagatcgctgagattcctaaagaggaagttaagccatttataactgaaagtaaaccttcagttgaacagagaaaacaagatgataagaaaatcaaagcttgtgttgaagaagttacaacaactctggaagaaactaagttcctcacagaaaacttgttactttatattgacattaatggcaatcttcatccagattctgccactcttgttagtgacattgacatcactttcttaaagaaagatgctccatatatagtgggtgatgttgttcaagagggtgttttaactgctgtggttatacctactaaaaaggctggtggcactactgaaatgctagcgaaagctttgagaaaagtgccaacagacaattatataaccacttacccgggtcagggtttaaatggttacactgtagaggaggcaaagacagtgcttaaaaagtgtaaaagtgccttttacattctaccatctattatctctaatgagaagcaagaaattcttggaactgtttcttggaatttgcgagaaatgcttgcacatgcagaagaaacacgcaaattaatgcctgtctgtgtggaaactaaagccatagtttcaactatacagcgtaaatataagggtattaaaatacaagagggtgtggttgattatggtgctagattttacttttacaccagtaaaacaactgtagcgtcacttatcaacacacttaacgatctaaatgaaactcttgttacaatgccacttggctatgtaacacatggcttaaatttggaagaagctgctcggtatatgagatctctcaaagtgccagctacagtttctgtttcttcacctgatgctgttacagcgtataatggttatcttacttcttcttctaaaacacctgaagaacattttattgaaaccatctcacttgctggttcctataaagattggtcctattctggacaatctacacaactaggtatagaatttcttaagagaggtgataaaagtgtatattacactagtaatcctaccacattccacctagatggtgaagttatcacctttgacaatcttaagacacttctttctttgagagaagtgaggactattaaggtgtttacaacagtagacaacattaacctccacacgcaagttgtggacatgtcaatgacatatggacaacagtttggtccaacttatttggatggagctgatgttactaaaataaaacctcataattcacatgaaggtaaaacattttatgttttacctaatgatgacactctacgtgttgaggcttttgagtactaccacacaactgatcctagttttctgggtaggtacatgtcagcattaaatcacactaaaaagtggaaatacccacaagttaatggtttaacttctattaaatgggcagataacaactgttatcttgccactgcattgttaacactccaacaaatagagttgaagtttaatccacctgctctacaagatgcttattacagagcaagggctggtgaagctgctaacttttgtgcacttatcttagcctactgtaataagacagtaggtgagttaggtgatgttagagaaacaatgagttacttgtttcaacatgccaatttagattcttgcaaaagagtcttgaacgtggtgtgtaaaacttgtggacaacagcagacaacccttaagggtgtagaagctgttatgtacatgggcacactttcttatgaacaatttaagaaaggtgttcagataccttgtacgtgtggtaaacaagctacaaaatatctagtacaacaggagtcaccttttgttatgatgtcagcaccacctgctcagtatgaacttaagcatggtacatttacttgtgctagtgagtacgctggtaattaccagtgtggtcactataaacatataacttctaaagaaactttgtattgcatagacggtgctttacttacaaagtcctcagaatacaaaggtcctattacggatgttttctacaaagaaaacagttacacaacaaccataaaaccagttacttataaattggatggtgttgtttgtacagaaattgaccctaagttggacaattattataagaaagacaattcttatttcacagagcaaccaattgatcttgtaccaaaccaaccatatccaaacgcaagcttcgataattttaagtttgtatgtgataatatcaaatttgctgatgatttaaaccagttaactggttataagaaacctgcttcaagagagcttaaagttacatttttccctgacttaaatggtgatgtggtggctattgattataaacactacacaccctcttttaagaaaggagctaaattgttacataaacctattgtttggcatgttaacaatgcaactaataaagccacgtataaaccaaatacctggtgtatacgttgtctttggagcacaaaaccagttgaaacatcaaattcgtttgatgtactgaagtcagaggacgcgcagggaatggataatcttgcctgcgaagatctaaaaccagtctctgaagaagtagtggaaaatcctaccatacagaaagacgttcttgagtgtaatgtgaaaactaccgaagttgtaggagacattatacttaaaccagcaaataatagtttaaaaattacagaagaggttggccacacagatctaatggctgcttatgtagacaattctagtcttactattaagaaacctaatgaattatctagagtattaggtttgaaaacccttgctactcatggtttagctgctgttaatagtgtcccttgggatactatagctaattatgctaagccttttcttaacaaagttgttagtacaactactaacatagttacacggtgtttaaaccgtgtttgtactaattatatgccttatttctttactttattgctacaattgtgtacttttactagaagtacaaattctagaattaaagcatctatgccgactactatagcaaagaatactgttaagagtgtcggtaaattttgtctagaggcttcatttaattatttgaagtcacctaatttttctaaactgataaatattataatttggtttttactattaagtgtttgcctaggttctttaatctactcaaccgctgctttaggtgttttaatgtctaatttaggcatgccttcttactgtactggttacagagaaggctatttgaactctactaatgtcactattgcaacctactgtactggttctataccttgtagtgtttgtcttagtggtttagattctttagacacctatccttctttagaaactatacaaattaccatttcatcttttaaatgggatttaactgcttttggcttagttgcagagtggtttttggcatatattcttttcactaggtttttctatgtacttggattggctgcaatcatgcaattgtttttcagctattttgcagtacattttattagtaattcttggcttatgtggttaataattaatcttgtacaaatggccccgatttcagctatggttagaatgtacatcttctttgcatcattttattatgtatggaaaagttatgtgcatgttgtagacggttgtaattcatcaacttgtatgatgtgttacaaacgtaatagagcaacaagagtcgaatgtacaactattgttaatggtgttagaaggtccttttatgtctatgctaatggaggtaaaggcttttgcaaactacacaattggaattgtgttaattgtgatacattctgtgctggtagtacatttattagtgatgaagttgcgagagacttgtcactacagtttaaaagaccaataaatcctactgaccagtcttcttacatcgttgatagtgttacagtgaagaatggttccatccatctttactttgataaagctggtcaaaagacttatgaaagacattctctctctcattttgttaacttagacaacctgagagctaataacactaaaggttcattgcctattaatgttatagtttttgatggtaaatcaaaatgtgaagaatcatctgcaaaatcagcgtctgtttactacagtcagcttatgtgtcaacctatactgttactagatcaggcattagtgtctgatgttggtgatagtgcggaagttgcagttaaaatgtttgatgcttacgttaatacgttttcatcaacttttaacgtaccaatggaaaaactcaaaacactagttgcaactgcagaagctgaacttgcaaagaatgtgtccttagacaatgtcttatctacttttatttcagcagctcggcaagggtttgttgattcagatgtagaaactaaagatgttgttgaatgtcttaaattgtcacatcaatctgacatagaagttactggcgatagttgtaataactatatgctcacctataacaaagttgaaaacatgacaccccgtgaccttggtgcttgtattgactgtagtgcgcgtcatattaatgcgcaggtagcaaaaagtcacaacattgctttgatatggaacgttaaagatttcatgtcattgtctgaacaactacgaaaacaaatacgtagtgctgctaaaaagaataacttaccttttaagttgacatgtgcaactactagacaagttgttaatgttgtaacaacaaagatagcacttaagggtggtaaaattgttaataattggttgaagcagttaattaaagttacacttgtgttcctttttgttgctgctattttctatttaataacacctgttcatgtcatgtctaaacatactgacttttcaagtgaaatcataggatacaaggctattgatggtggtgtcactcgtgacatagcatctacagatacttgttttgctaacaaacatgctgattttgacacatggtttagccagcgtggtggtagttatactaatgacaaagcttgcccattgattgctgcagtcataacaagagaagtgggttttgtcgtgcctggtttgcctggcacgatattacgcacaactaatggtgactttttgcatttcttacctagagtttttagtgcagttggtaacatctgttacacaccatcaaaacttatagagtacactgactttgcaacatcagcttgtgttttggctgctgaatgtacaatttttaaagatgcttctggtaagccagtaccatattgttatgataccaatgtactagaaggttctgttgcttatgaaagtttacgccctgacacacgttatgtgctcatggatggctctattattcaatttcctaacacctaccttgaaggttctgttagagtggtaacaacttttgattctgagtactgtaggcacggcacttgtgaaagatcagaagctggtgtttgtgtatctactagtggtagatgggtacttaacaatgattattacagatctttaccaggagttttctgtggtgtagatgctgtaaatttacttactaatatgtttacaccactaattcaacctattggtgctttggacatatcagcatctatagtagctggtggtattgtagctatcgtagtaacatgccttgcctactattttatgaggtttagaagagcttttggtgaatacagtcatgtagttgcctttaatactttactattccttatgtcattcactgtactctgtttaacaccagtttactcattcttacctggtgtttattctgttatttacttgtacttgacattttatcttactaatgatgtttcttttttagcacatattcagtggatggttatgttcacacctttagtacctttctggataacaattgcttatatcatttgtatttccacaaagcatttctattggttctttagtaattacctaaagagacgtgtagtctttaatggtgtttcctttagtacttttgaagaagctgcgctgtgcacctttttgttaaataaagaaatgtatctaaagttgcgtagtgatgtgctattacctcttacgcaatataatagatacttagctctttataataagtacaagtattttagtggagcaatggatacaactagctacagagaagctgcttgttgtcatctcgcaaaggctctcaatgacttcagtaactcaggttctgatgttctttaccaaccaccacaaacctctatcacctcagctgttttgcagagtggttttagaaaaatggcattcccatctggtaaagttgagggttgtatggtacaagtaacttgtggtacaactacacttaacggtctttggcttgatgacgtagtttactgtccaagacatgtgatctgcacctctgaagacatgcttaaccctaattatgaagatttactcattcgtaagtctaatcataatttcttggtacaggctggtaatgttcaactcagggttattggacattctatgcaaaattgtgtacttaagcttaaggttgatacagccaatcctaagacacctaagtataagtttgttcgcattcaaccaggacagactttttcagtgttagcttgttacaatggttcaccatctggtgtttaccaatgtgctatgaggcccaatttcactattaagggttcattccttaatggttcatgtggtagtgttggttttaacatagattatgactgtgtctctttttgttacatgcaccatatggaattaccaactggagttcatgctggcacagacttagaaggtaacttttatggaccttttgttgacaggcaaacagcacaagcagctggtacggacacaactattacagttaatgttttagcttggttgtacgctgctgttataaatggagacaggtggtttctcaatcgatttaccacaactcttaatgactttaaccttgtggctatgaagtacaattatgaacctctaacacaagatcatgttgacatactaggacctctttctgctcaaactggaattgccgttttagatatgtgtgcttcattaaaagaattactgcaaaatggtatgaatggacgtaccatattgggtagtgctttattagaagatgaatttacaccttttgatgttgttagacaatgctcaggtgttactttccaaagtgcagtgaaaagaacaatcaagggtacacaccactggttgttactcacaattttgacttcacttttagttttagtccagagtactcaatggtctttgttcttttttttgtatgaaaatgcctttttaccttttgctatgggtattattgctatgtctgcttttgcaatgatgtttgtcaaacataagcatgcatttctctgtttgtttttgttaccttctcttgccactgtagcttattttaatatggtctatatgcctgctagttgggtgatgcgtattatgacatggttggatatggttgatactagtttgtctggttttaagctaaaagactgtgttatgtatgcatcagctgtagtgttactaatccttatgacagcaagaactgtgtatgatgatggtgctaggagagtgtggacacttatgaatgtcttgacactcgtttataaagtttattatggtaatgctttagatcaagccatttccatgtgggctcttataatctctgttacttctaactactcaggtgtagttacaactgtcatgtttttggccagaggtattgtttttatgtgtgttgagtattgccctattttcttcataactggtaatacacttcagtgtataatgctagtttattgtttcttaggctatttttgtacttgttactttggcctcttttgtttactcaaccgctactttagactgactcttggtgtttatgattacttagtttctacacaggagtttagatatatgaattcacagggactactcccacccaagaatagcatagatgccttcaaactcaacattaaattgttgggtgttggtggcaaaccttgtatcaaagtagccactgtacagtctaaaatgtcagatgtaaagtgcacatcagtagtcttactctcagttttgcaacaactcagagtagaatcatcatctaaattgtgggctcaatgtgtccagttacacaatgacattctcttagctaaagatactactgaagcctttgaaaaaatggtttcactactttctgttttgctttccatgcagggtgctgtagacataaacaagctttgtgaagaaatgctggacaacagggcaaccttacaagctatagcctcagagtttagttcccttccatcatatgcagcttttgctactgctcaagaagcttatgagcaggctgttgctaatggtgattctgaagttgttcttaaaaagttgaagaagtctttgaatgtggctaaatctgaatttgaccgtgatgcagccatgcaacgtaagttggaaaagatggctgatcaagctatgacccaaatgtataaacaggctagatctgaggacaagagggcaaaagttactagtgctatgcagacaatgcttttcactatgcttagaaagttggataatgatgcactcaacaacattatcaacaatgcaagagatggttgtgttcccttgaacataatacctcttacaacagcagccaaactaatggttgtcataccagactataacacatataaaaatacgtgtgatggtacaacatttacttatgcatcagcattgtgggaaatccaacaggttgtagatgcagatagtaaaattgttcaacttagtgaaattagtatggacaattcacctaatttagcatggcctcttattgtaacagctttaagggccaattctgctgtcaaattacagaataatgagcttagtcctgttgcactacgacagatgtcttgtgctgccggtactacacaaactgcttgcactgatgacaatgcgttagcttactacaacacaacaaagggaggtaggtttgtacttgcactgttatccgatttacaggatttgaaatgggctagattccctaagagtgatggaactggtactatctatacagaactggaaccaccttgtaggtttgttacagacacacctaaaggtcctaaagtgaagtatttatactttattaaaggattaaacaacctaaatagaggtatggtacttggtagtttagctgccacagtacgtctacaagctggtaatgcaacagaagtgcctgccaattcaactgtattatctttctgtgcttttgctgtagatgctgctaaagcttacaaagattatctagctagtgggggacaaccaatcactaattgtgttaagatgttgtgtacacacactggtactggtcaggcaataacagttacaccggaagccaatatggatcaagaatcctttggtggtgcatcgtgttgtctgtactgccgttgccacatagatcatccaaatcctaaaggattttgtgacttaaaaggtaagtatgtacaaatacctacaacttgtgttaatgaccctgtgggttttacacttaaaaacacagtctgtaccgtctgcggtatgtggaaaggttatggctgtagttgtgatcaactccgcgaacccatgcttcagtcagctgatgcacaatcgtttttaaacgggtttgcggtgtaa

SEQ ID NO: 338 - DNA, 3816 bp, Severe acute respiratory syndrome coronavirus 2
  source 1..3816: mol_type = unassigned DNA
atgtttgtttttcttgttttattgccactagtctctagtcagtgtgttaatcttacaaccagaactcaattaccccctgcatacactaattctttcacacgtggtgtttattaccctgacaaagttttcagatcctcagttttacattcaactcaggacttgttcttacctttcttttccaatgttacttggttccatgctatctctgggaccaatggtactaagaggtttgataaccctgtcctaccatttaatgatggtgtttattttgcttccactgagaagtctaacataataagaggctggatttttggtactactttagattcgaagacccagtccctacttattgttaataacgctactaatgttgttattaaagtctgtgaatttcaattttgtaatgatccatttttgggtgtttattaccacaaaaacaacaaaagttggatggaaagtgagttcagagtttattctagtgcgaataattgcacttttgaatatgtctctcagccttttcttatggaccttgaaggaaaacagggtaatttcaaaaatcttagggaatttgtgtttaagaatattgatggttattttaaaatatattctaagcacacgcctattaatttagtgcgtgatctccctcagggtttttcggctttagaaccattggtagatttgccaataggtattaacatcactaggtttcaaactttacttgctttacatagaagttatttgactcctggtgattcttcttcaggttggacagctggtgctgcagcttattatgtgggttatcttcaacctaggacttttctattaaaatataatgaaaatggaaccattacagatgctgtagactgtgcacttgaccctctctcagaaacaaagtgtacgttgaaatccttcactgtagaaaaaggaatctatcaaacttctaactttagagtccaaccaacagaatctattgttagatttcctaatattacaaacttgtgcccttttggtgaagtttttaacgccaccagatttgcatctgtttatgcttggaacaggaagagaatcagcaactgtgttgctgattattctgtcctatataattccgcatcattttccacttttaagtgttatggagtgtctcctactaaattaaatgatctctgctttactaatgtctatgcagattcatttgtaattagaggtgatgaagtcagacaaatcgctccagggcaaactggaaagattgctgattataattataaattaccagatgattttacaggctgcgttatagcttggaattctaacaatcttgattctaaggttggtggtaattataattacctgtatagattgtttaggaagtctaatctcaaaccttttgagagagatatttcaactgaaatctatcaggccggtagcacaccttgtaatggtgttgaaggttttaattgttactttcctttacaatcatatggtttccaacccactaatggtgttggttaccaaccatacagagtagtagtactttcttttgaacttctacatgcaccagcaactgtttgtggacctaaaaagtctactaatttggttaaaaacaaatgtgtcaatttcaacttcaatggtttaacaggcacaggtgttcttactgagtctaacaaaaagtttctgcctttccaacaatttggcagagacattgctgacactactgatgctgtccgtgatccacagacacttgagattcttgacattacaccatgttcttttggtggtgtcagtgttataacaccaggaacaaatacttctaaccaggttgctgttctttatcagggtgttaactgcacagaagtccctgttgctattcatgcagatcaacttactcctacttggcgtgtttattctacaggttctaatgtttttcaaacacgtgcaggctgtttaataggggctgaacatgtcaacaactcatatgagtgtgacatacccattggtgcaggtatatgcgctagttatcagactcagactaattctcctcggcgggcacgtagtgtagctagtcaatccatcattgcctacactatgtcacttggtgcagaaaattcagttgcttactctaataactctattgccatacccacaaattttactattagtgttaccacagaaattctaccagtgtctatgaccaagacatcagtagattgtacaatgtacatttgtggtgattcaactgaatgcagcaatcttttgttgcaatatggcagtttttgtacacaattaaaccgtgctttaactggaatagctgttgaacaagacaaaaacacccaagaagtttttgcacaagtcaaacaaatttacaaaacaccaccaattaaagattttggtggttttaatttttcacaaatattaccagatccatcaaaaccaagcaagagatcatttattgaagatctacttttcaacaaagtgacacttgcagatgctggcttcatcaaacaatatggtgattgccttggtgatattgctgctagagacctcatttgtgcacaaaagtttaacggccttactgttttgccacctttgctcacagatgaaatgattgctcaatacacttctgcactgttagcgggtacaatcacttctggttggacctttggtgcaggtgctgcattacaaataccatttgctatgcaaatggcttataggtttaatggtattggagttacacagaatgttctctatgagaaccaaaaattgattgccaaccaatttaatagtgctattggcaaaattcaagactcactttcttccacagcaagtgcacttggaaaacttcaagatgtggtcaaccaaaatgcacaagctttaaacacgcttgttaaacaacttagctccaattttggtgcaatttcaagtgttttaaatgatatcctttcacgtcttgacaaagttgaggctgaagtgcaaattgataggttgatcacaggcagacttcaaagtttgcagacatatgtgactcaacaattaattagagctgcagaaatcagagcttctgctaatcttgctgctactaaaatgtcagagtgtgtacttggacaatcaaaaagagttgatttttgtggaaagggctatcatcttatgtccttccctcagtcagcacctcatggtgtagtcttcttgcatgtgacttatgtccctgcacaagaaaagaacttcacaactgctcctgccatttgtcatgatggaaaagcacactttcctcgtgaaggtgtctttgtttcaaatggcacacactggtttgtaacacaaaggaatttttatgaaccacaaatcattactacagacaacacatttgtgtctggtaactgtgatgttgtaataggaattgtcaacaacacagtttatgatcctttgcaacctgaattagactcattcaaggaggagttagataaatattttaagaatcatacatcaccagatgttgatttaggtgacatctctggcattaatgcttcagttgtaaacattcaaaaagaaattgaccgcctcaatgaggttgccaagaatttaaatgaatctctcatcgatctccaagaacttggaaagtatgagcagtatataaaatggccatggtacatttggctaggttttatagctggcttgattgccatagtaatggtgacaattatgctttgctgtatgaccagttgctgtagttgtctcaagggctgttgttcttgtggatcctgctgcaaatttgatgaagacgactctgagccagtgctcaaaggagtcaaattacattacacataa

SEQ ID NO: 339 - DNA, 828 bp, Severe acute respiratory syndrome coronavirus 2
  source 1..828: mol_type = unassigned DNA
atggatttgtttatgagaatcttcacaattggaactgtaactttgaagcaaggtgaaatcaaggatgctactccttcagattttgttcgcgctactgcaacgataccgatacaagcctcactccctttcggatggcttattgttggcgttgcacttcttgctgtttttcatagcgcttccaaaatcataaccctcaaaaagagatggcaactagcactctccaagggtgttcactttgtttgcaacttgctgttgttgtttgtaacagtttactcacaccttttgctcgttgctgctggccttgaagccccttttctctatctttatgctttagtctacttcttgcagagtataaactttgtaagaataataatgaggctttggctttgctggaaatgccgttccaaaaacccattactttatgatgccaactattttctttgctggcatattaattgttacgactattgtataccttacaatagtgtaacttcttcaattgtcattacttcaggtgatggcacaacaagtcctatttctgaacatgactaccagattggtggttatactgaaaaatgggaatctggagtaaaagactgtgttgtattacacagttacttcacttcagactattaccagctgtactcaactcaattgagtacagacactggtgttgaacatgttaccttcttcatctacaataaaattgttgatgagcctgaagaacatgtccaaattcacacaatcgacggttcatccggagttgttaatccagtaatggaaccaatttatgatgaaccgacgacgactactagcgtgcctttgtaa

SEQ ID NO: 340 - DNA, 228 bp, Severe acute respiratory syndrome coronavirus 2; identical to SEQ ID NO: 305
  source 1..228: mol_type = unassigned DNA

SEQ ID NO: 341 - DNA, 669 bp, Severe acute respiratory syndrome coronavirus 2
  source 1..669: mol_type = unassigned DNA
atggcagattccaacggtactattaccgttgaagagcttaaaaagctccttgaacaatggaacctagtaataggtttcctattccttacatggatttgtcttctacaatttgcctatgccaacaggaataggtttttgtatgtaattaagttaattttcctctggctgttatggccagtaactttagcttgttttgtgcttgctgctgtttacagaataaattggatcaccggtggaattgctatcgcaatggcttgtcttgtaggcttgatgtggctcagctacttcattgcttctttcagactgtttgcgcgtacgcgttccatgtggtcattcaatccagaaactaacattcttctcaacgtgccactccatggcactattctgaccagaccgcttctagaaagtgaactcgtaatcggagctgtgatccttcgtggacatcttcgtattgctggacaccatctaggacgctgtgacatcaaggacctgcctaaagaaatcactgttgctacatcacgaacgctttcttattacaaattgggagcttcgcagcgtgtagcaggtgactcaggttttgctgcatacagtcgctacaggattggcaactataaattaaacacagaccattccagtagcagtgacaatattgctttgcttgtacagtaa

SEQ ID NO: 342 - DNA, 186 bp, Severe acute respiratory syndrome coronavirus 2; identical to SEQ ID NO: 307
  source 1..186: mol_type = unassigned DNA

SEQ ID NO: 343 - DNA, 366 bp, Severe acute respiratory syndrome coronavirus 2; identical to SEQ ID NO: 308
  source 1..366: mol_type = unassigned DNA

SEQ ID NO: 344 - DNA, 132 bp, Severe acute respiratory syndrome coronavirus 2; identical to SEQ ID NO: 309
  source 1..132: mol_type = unassigned DNA

SEQ ID NO: 345 - DNA, 366 bp, Severe acute respiratory syndrome coronavirus 2; identical to SEQ ID NO: 322
  source 1..366: mol_type = unassigned DNA

SEQ ID NO: 346 - DNA, 1260 bp, Severe acute respiratory syndrome coronavirus 2
  source 1..1260: mol_type = unassigned DNA
atgtctgataatggaccccaaaatcagcgaaatgcaccccgcattacgtttggtggaccctcagattcaactggcagtaaccagaatggagaacgcagtggggcgcgatcaaaacaacgtcggccccaaggtttacccaataatactgcgtcttggttcaccgctctcactcaacatggcaaggaagaccttaaattccctcgaggacaaggcgttccaattaacaccaatagcagtccagatgaccaaattggctactaccgaagagctaccagacgaattcgtggtggtgacggtaaaatgaaagatctcagtccaagatggtatttctactacctaggaactgggccagaagctggacttccctatggtgctaacaaagacggcatcatatgggttgcaactgagggagcctttaatacaccaaaagatcacattggcacccgcaatcctgctaacaatgctgcaatcgtgctacaacttcctcaaggaacaacattgccaaaaggcttctacgcagaagggagcagaggcggcagtcaagcctcttctcgttcctcatcacgtagtcgcaacagttcaagaaattcaactccaggcagcagtaggggaatttctcctgctagaatggctggcaatggcggtgatgctgctcttgctttgctgctgcttgacagattgaaccagcttgagagcaaaatgtctggtaaaggccaacaacaacaaggccaaactgtcactaagaaatctgctgctgaggcttctaagaagcctcggcaaaaacgtactgccactaaagcatacaatgtaacacaagctttcggcagacgtggtccagaacaaacccaaggaaattttggggaccaggaactaatcagacaaggaactgattacaaacattggccgcaaattgcacaatttgcccccagcgcttcagcgttcttcggaatgtcgcgcattggcatggaagtcacaccttcgggaacgtggttgacctacacaggtgccatcaaattggatgacaaagatccaaatttcaaagatcaagtcattttgctgaataagcatattgacgcatacaaaacattcccaccaacagagcctaaaaaggacaaaaagaagaaggctgatgaaactcaagccttaccgcagagacagaagaaacagcaaactgtgactcttcttcctgctgcagatttggatgatttctccaaacaattgcaacaatccatgagcagtgctgactcaactcaggcctaa

SEQ ID NO: 347 - DNA, 117 bp, Severe acute respiratory syndrome coronavirus 2; identical to SEQ ID NO: 312
  source 1..117: mol_type = unassigned DNA

SEQ ID NO: 348-400 - skipped (53 entries)

SEQ ID NO: 401 - protein, 7093 aa, Severe acute respiratory syndrome coronavirus 2
MESLVPGFNEKTHVQLSLPVLQVRDVLVRGFGDSVEEVLSEARQHLKDGTCGLVEVEKGVLPQLEQPYVFIKRSDARTAPHGHVMVELVAELEGIQYGRSGETLGVLVPHVGEIPVAYRKVLLRKNGNKGAGGHSYGADLKSFDLGDELGTDPYEDFQENWNTKHSSGVTRELMRELNGGAYTRYVDNNFCGPDGYPLECIKDLLARAGKASCTLSEQLDFIDTKRGVYCCREHEHEIAWYTERSEKSYELQTPFEIKLAKKFDTFNGECPNFVFPLNSIIKTIQPRVEKKKLDGFMGRIRSVYPVASPNECNQMCLSTLMKCDHCGETSWQTGDFVKATCEFCGTENLTKEGATTCGYLPQNAVVKIYCPACHNSEVGPEHSLAEYHNESGLKTILRKGGRTIAFGGCVFSYVGCHNKCAYWVPRASANIGCNHTGVVGEGSEGLNDNLLEILQKEKVNINIVGDFKLNEEIAIILASFSASTSAFVETVKGLDYKAFKQIVESCGNFKVTKGKAKKGAWNIGEQKSILSPLYAFASEAARVVRSIFSRTLETAQNSVRVLQKAAITILDGISQYSLRLIDAMMFTSDLATNNLVVMAYITGGVVQLTSQWLTNIFGTVYEKLKPVLDWLEEKFKEGVEFLRDGWEIVKFISTCACEIVGGQIVTCAKEIKESVQTFFKLVNKFLALCADSIIIGGAKLKALNLGETFVTHSKGLYRKCVKSREETGLLMPLKAPKEIIFLEGETLPTEVLTEEVVLKTGDLQPLEQPTSEAVEAPLVGTPVCINGLMLLEIKDTEKYCALAPNMMVTNNTFTLKGGAPTKVTFGDDTVIEVQGYKSVNITFELDERIDKVLNEKCSAYTVELGTEVNEFACVVADAVIKTLQPVSELLTPLGIDLDEWSMATYYLFDESGEFKLASHMYCSFYPPDEDEEEGDCEEEEFEPSTQYEYGTEDDYQGKPLEFGATSAALQPEEEQEEDWLDDDSQQTVGQQDGSEDNQTTIIQTIVEVQPQLEMELTPVVQTIEVNSFSGYLKLTDNVYIKNADIVEEAKKVKPTVVVNAANVYLKHGGGVAGALNKATNNAMQVESDDYIATNGPLKVGGSCVLSGHNLAKHCLHVVGPNVNKGEDIQLLKSAYENFNQHEVLLAPLLSAGIFGADPIHSLRVCVDTVRTNVYLAVFDKNLYDKLVSSFLEMKSEKQVEQKIAEIPKEEVKPFITESKPSVEQRKQDDKKIKACVEEVTTTLEETKFLTENLLLYIDINGNLHPDSATLVSDIDITFLKKDAPYIVGDVVQEGVLTAVVIPTKKAGGTTEMLAKALRKVPTDNYITTYPGQGLNGYTVEEAKTVLKKCKSAFYILPSIISNEKQEILGTVSWNLREMLAHAEETRKLMPVCVETKAIVSTIQRKYKGIKIQEGVVDYGARFYFYTSKTTVASLINTLNDLNETLVTMPLGYVTHGLNLEEAARYMRSLKVPATVSVSSPDAVTAYNGYLTSSSKTPEEHFIETISLAGSYKDWSYSGQSTQLGIEFLKRGDKSVYYTSNPTTFHLDGEVITFDNLKTLLSLREVRTIKVFTTVDNINLHTQVVDMSMTYGQQFGPTYLDGADVTKIKPHNSHEGKTFYVLPNDDTLRVEAFEYYHTTDPSFLGRYMSALNHTKKWKYPQVNGLTSIKWADNNCYLATALLTLQQIELKFNPPALQDAYYRARAGEADNFCALILAYCNKTVGELGDVRETMSYLFQHANLDSCKRVLNVVCKTCGQQQTTLKGVEAVMYMGTLSYEQFKKGVQIPCTCGKQATKYLVQQESPFVMMSAPPAQYELKHGTFTCASEYTGNYQCGHYKHITSKETLYCIDGALLTKSSEYKGPITDVFYKENSYTTTIKPVTYKLDGVVCTEIDPKLDNYYKKDNSYFTEQPIDLVPNQPYPNASFDNFKFVCDNIKFADDLNQLTGYKKPASRELKVTFFPDLNGDVVAIDYKHYTPSFKKGAKLLHKPIVWHVNNATNKATYKPNTWCIRCLWSTKPVETSNSFDVLKSEDAQGMDNLACEDLKPVSEEVVENPTIQKDVLECNVKTTEVVGDIILKPANNSLKITEEVGHTDLMAAYVDNSSLTIKKPNELSRVLGLKTLATHGLAAVNSVPWDTIANYAKPFLNKVVSTTTNIVTRCLNRVCTNYMPYFFTLLLQLCTFTRSTNSRIKASMPTTIAKNTVKSVGKFCLEASFNYLKSPNFSKLINITIWFLLLSVCLGSLIYSTAALGVLMSNLGMPSYCTGYREGYLNSTNVTIATYCTGSIPCSVCLSGLDSLDTYPSLETIQITISSFKWDLTAFGLVAEWFLAYILFTRFFYVLGLAAIMQLFFSYFAVHFISNSWLMWLIINLVQMAPISAMVRMYIFFASFYYVWKSYVHVVDGCNSSTCMMCYKRNRATRVECTTIVNGVRRSFYVYANGGKGFCKLHNWNCVNCDTFCAGSTFISDEVARDLSLQFKRPINPTDQSSYIVDSVTVKNGSIHLYFDKAGQKTYERHSLSHFVNLDNLRANNTKGSLPINVIVFDGKSKCEESSAKSASVYYSQLMCQPILLLDQALVSDVGDSAEVAVKMFDAYVNTFSSTFNVPMEKLKTLVATAEAELAKNVSLDNVLSTFISAARQGFVDSDVETKDVVECLKLSHQSDIEVTGDSCNNYMLTYNKVENMTPRDLGACIDCSARHINAQVAKSHNIALIWNVKDFMSLSEQLRKQIRSAAKKNNLPFKLTCATTRQVVNVVTTKIALKGGKIVNNWLKQLIKVTLVFLFVAAIFYLITPVHVMSKHTDFSSEIIGYKAIDGGVTRDIASTDTCFANKHADFDTWFSQRGGSYTNDKACPLIAAVITREVGFVVPGLPGTILRTTNGDFLHFLPRVFSAVGNICYTPSKLIEYTDFATSACVLAAECTIFKDASGKPVPYCYDTNVLEGSVAYESLRPDTRYVLMDGSIIQFPNTYLEGSVRVVTTFDSEYCRHGTCERSEAGVCVSTSGRWVLNNDYYRSLPGVFCGVDAVNLLTNMFTPLIQPIGALDISASIVAGGIVAIVVTCLAYYFMRFRRAFGEYSHVVAFNTLLFLMSFTVLCLTPVYSFLPGVYSVIYLYLTFYLTNDVSFLAHIQWMVMFTPLVPFWITIAYIICISTKHFYWFFSNYLKRRVVFNGVSFSTFEEAALCTFLLNKEMYLKLRSDVLLPLTQYNRYLALYNKYKYFSGAMDTTSYREAACCHLAKALNDFSNSGSDVLYQPPQTSITSAVLQSGFRKMAFPSGKVEGCMVQVTCGTTTLNGLWLDDVVYCPRHVICTSEDMLNPNYEDLLIRKSNHNFLVQAGNVQLRVIGHSMQNCVLKLKVDTANPKTPKYKFVRIQPGQTFSVLACYNGSPSGVYQCAMRPNFTIKGSFLNGSCGSVGFNIDYDCVSFCYMHHMELPTGVHAGTDLEGNFYGPFVDRQTAQAAGTDTTITVNVLAWLYAAVINGDRWFLNRFTTTLNDFNLVAMKYNYEPLTQDHVDILGPLSAQTGIAVLDMCASLKELLQNGMNGRTILGSALLEDEFTPFDVVRQCSGVTFQSAVKRTIKGTHHWLLLTILTSLLVLVQSTQWSLFFFLYENAFLPFAMGIIAMSAFAMMFVKHKHAFLCLFLLPSLATVAYFNMVYMPASWVMRIMTWLDMVDTSLKLKDCVMYASAVVLLILMTARTVYDDGARRVWTLMNVLTLVYKVYYGNALDQAISMWALIISVTSNYSGVVTTVMFLARGIVFMCVEYCPIFFITGNTLQCIMLVYCFLGYFCTCYFGLFCLLNRYFRLTLGVYDYLVSTQEFRYMNSQGLLPPKNSIDAFKLNIKLLGVGGKPCIKVATVQSKMSDVKCTSVVLLSVLQQLRVESSSKLWAQCVQLHNDILLAKDTTEAFEKMVSLLSVLLSMQGAVDINKLCEEMLDNRATLQAIASEFSSLPSYAAFATAQEAYEQAVANGDSEVVLKKLKKSLNVAKSEFDRDAAMQRKLEKMADQAMTQMYKQARSEDKRAKVTSAMQTMLFTMLRKLDNDALNNIINNARDGCVPLNIIPLTTAAKLMVVIPDYNTYKNTCDGTTFTYASALWEIQQVVDADSKIVQLSEISMDNSPNLAWPLIVTALRANSAVKLQNNELSPVALRQMSCAAGTTQTACTDDNALAYYNTTKGGRFVLALLSDLQDLKWARFPKSDGTGTIYTELEPPCRFVTDTPKGPKVKYLYFIKGLNNLNRGMVLGSLAATVRLQAGNATEVPANSTVLSFCAFAVDAAKAYKDYLASGGQPITNCVKMLCTHTGTGQAITVTPEANMDQESFGGASCCLYCRCHIDHPNPKGFCDLKGKYVQIPTTCANDPVGFTLKNTVCTVCGMWKGYGCSCDQLREPMLQSADAQSFLNRVCGVSAARLTPCGTGTSTDVVYRAFDIYNDKVAGFAKFLKTNCCRFQEKDEDDNLIDSYFVVKRHTFSNYQHEETIYNLLKDCPAVAKHDFFKFRIDGDMVPHISRQRLTKYTMADLVYALRHFDEGNCDTLKEILVTYNCCDDDYFNKKDWYDFVENPDILRVYANLGERVRQALLKTVQFCDAMRNAGIVGVLTLDNQDLNGNWYDFGDFIQTTPGSGVPVVDSYYSLLMPILTLTRALTAESHVDTDLTKPYIKWDLLKYDFTEERLKLFDRYFKYWDQTYHPNCVNCLDDRCILHCANFNVLFSTVFPLTSFGPLVRKIFVDGVPFVVSTGYHFRELGVVHNQDVNLHSSRLSFKELLVYAADPAMHAASGNLLLDKRTTCFSVAALTNNVAFQTVKPGNFNKDFYDFAVSKGFFKEGSSVELKHFFFAQDGNAAISDYDYYRYNLPTMCDIRQLLFVVEVVDKYFDCYDGGCINANQVIVNNLDKSAGFPFNKWGKARLYYDSMSYEDQDALFAYTKRNVIPTITQMNLKYAISAKNRARTVAGVSICSTMTNRQFHQKLLKSIAATRGATVVIGTSKFYGGWHNMLKTVYSDVENPHLMGWDYPKCDRAMPNMLRIMASLVLARKHTTCCSLSHRFYRLANECAQVLSEMVMCGGSLYVKPGGTSSGDATTAYANSVFNICQAVTANVNALLSTDGNKIADKYVRNLQHRLYECLYRNRDVDTDFVNEFYAYLRKHFSMMILSDDAVVCFNSTYASQGLVASIKNFKSVLYYQNNVFMSEAKCWTETDLTKGPHEFCSQHTMLVKQGDDYVYLPYPDPSRILGAGCFVDDIVKTDGTLMIERFVSLAIDAYPLTKHPNQEYADVFHLYLQYIRKLHDELTGHMLDMYSVMLTNDNTSRYWEPEFYEAMYTPHTVLQAVGACVLCNSQTSLRCGACIRRPFLCCKCCYDHVISTSHKLVLSVNPYVCNAPGCDVTDVTQLYLGGMSYYCKSHKPSISFPLCANGQVFGLYKNTCVGSDNVTDFNAIATCDWTNAGDYILANTCTERLKLFAAETLKATEETFKLSYGIATVREVLSDRELHLSWEVGKPRPPLNRNYVFTGYRVTKNSKVQIGEYTFEKGDYGDAVVYRGTTTYKLNVGDYFVLTSHTVMPLSAPTLVPQEHYVRITGLYPTLNISDEFSSNVANYQKVGMQKYSTLQGPPGTGKSHFAIGLALYYPSARIVYTACSHAAVDALCEKALKYLPIDKCSRIIPARARVECFDKFKVNSTLEQYVFCTVNALPETTADIVVFDEISMATNYDLSVVNARLRAKHYVYIGDPAQLPAPRTLLTKGTLEPEYFNSVCRLMKTIGPDMFLGTCRRCPAEIVDTVSALVYDNRLKAHKDKSAQCFKMFYKGVITHDVSSAINRPQIGVVREFLTRNPAWRKAVFISPYNSQNAVASKILGLPTQTVDSSQGSEYDYVIFTQTTETAHSCNVNRFNVAITRAKVGILCIMSDRDLYDKLQFTSLEIPRRNVATLQAENVTGLFKDCSKVITGLHPTQAPTHLSVDTKFKTEGLCVDIPGIPKDMTYRRLISMMGFKMNYQVNGYPNMFITREEAIRHVRAWIGFDVEGCHATREAVGTNLPLQLGFSTGVNLVAVPTGYVDTPNNTDFSRVSAKPPPGDQFKHLIPLMYKGLPWNVVRIKIVQMLSDTLKNLSDRVVFVLWAHGFELTSMKYFVKIGPERTCCLCDRRATCFSTASDTYACWHHSIGFDYVYNPFMIDVQQWGFTGNLQSNHDLYCQVHGNAHVASCDAIMTRCLAVHECFVKRVDWTIEYPIIGDELKINAACRKVQHMVVKAALLADKFPVLHDIGNPKAIKCVPQADVEWKFYDAQPCSDKAYKIEELFYSYATHSDKFTDGVCLFWNCNVDRYPANSIVCRFDTRVLSNLNLPGCDGGSLYVNKHAFHTPAFDKSAFVNLKQLPFFYYSDSPCESHGKQVVSDIDYVPLKSATCITRCNLGGAVCRHHANEYRLYLDAYNMMISAGFSLWVYKQFDTYNLWNTFTRLQSLENVAFNVVNKGHFDGQQGEVPVSIINNTVYTKVDGVDVELFENKTTLPVNVAFELWAKRNIKPVPEVKILNNLGVDIAANTVIWDYKRDAPAHISTIGVCSMTDIAKKPTETICAPLTVFFDGRVDGQVDLFRNARNGVLITEGSVKGLQPSVGPKQASLNGVTLIGEAVKTQFNYYKKVDGVVQQLPETYFTQSRNLQEFKPRSQMEIDFLELAMDEFIERYKLEGYAFEHIVYGDFSHSQLGGLHLLIGLAKRFKESPFELEDFIPMDSTVKNYFITDAQTGSSKCVCSVIDLLLDDFVEIIKSQDLSVVSKVVKVTIDYTEISFMLWCKDGHVETFYPKLQSSQAWQPGVAMPNLYKMQRMLLEKCDLQNYGDSATLPKGIMMNVAKYTQLCQYLNTLTLAVPYNMRVIHFGAGSDKGVAPGTAVLRQWLPTGTLLVDSDLNDFVSDADSTLIGDCATVHTANKWDLIISDMYDPKTKNVTKENDSKEGFFTYICGFIQQKLALGGSVAIKITEHSWNADLYKLMGHFAWWTAFVTNVNASSSEAFLIGCNYLGKPREQIDGYVMHANYIFWRNTNPIQLSSYSLFDMSKFPLKLRGTAVMSLKEGQINDMILSLLSKGRLIIRENNRVVISSDVLVNN

SEQ ID NO: 402 - protein, 4402 aa, Severe acute respiratory syndrome coronavirus 2
MESLVPGFNEKTHVQLSLPVLQVRDVLVRGFGDSVEEVLSEARQHLKDGTCGLVEVEKGVLPQLEQPYVFIKRSDARTAPHGHVMVELVAELEGIQYGRSGETLGVLVPHVGEIPVAYRKVLLRKNGNKGAGGHSYGADLKSFDLGDELGTDPYEDFQENWNTKHSSGVTRELMRELNGGAYTRYVDNNFCGPDGYPLECIKDLLARAGKASCTLSEQLDFIDTKRGVYCCREHEHEIAWYTERSEKSYELQTPFEIKLAKKFDTFNGECPNFVFPLNSIIKTIQPRVEKKKLDGFMGRIRSVYPVASPNECNQMCLSTLMKCDHCGETSWQTGDFVKATCEFCGTENLTKEGATTCGYLPQNAVVKIYCPACHNSEVGPEHSLAEYHNESGLKTILRKGGRTIAFGGCVFSYVGCHNKCAYWVPRASANIGCNHTGVVGEGSEGLNDNLLEILQKEKVNINIVGDFKLNEEIAIILASFSASTSAFVETVKGLDYKAFKQIVESCGNFKVTKGKAKKGAWNIGEQKSILSPLYAFASEAARVVRSIFSRTLETAQNSVRVLQKAAITILDGISQYSLRLIDAMMFTSDLATNNLVVMAYITGGVVQLTSQWLTNIFGTVYEKLKPVLDWLEEKFKEGVEFLRDGWEIVKFISTCACEIVGGQIVTCAKEIKESVQTFFKLVNKFLALCADSIIIGGAKLKALNLGETFVTHSKGLYRKCVKSREETGLLMPLKAPKEIIFLEGETLPTEVLTEEVVLKTGDLQPLEQPTSEAVEAPLVGTPVCINGLMLLEIKDTEKYCALAPNMMVTNNTFTLKGGAPTKVTFGDDTVIEVQGYKSVNITFELDERIDKVLNEKCSAYTVELGTEVNEFACVVADAVIKTLQPVSELLTPLGIDLDEWSMATYYLFDESGEFKLASHMYCSFYPPDEDEEEGDCEEEEFEPSTQYEYGTEDDYQGKPLEFGATSAALQPEEEQEEDWLDDDSQQTVGQQDGSEDNQTTIIQTIVEVQPQLEMELTPVVQTIEVNSFSGYLKLTDNVYIKNADIVEEAKKVKPTVVVNAANVYLKHGGGVAGALNKATNNAMQVESDDYIATNGPLKVGGSCVLSGHNLAKHCLHVVGPNVNKGEDIQLLKSAYENFNQHEVLLAPLLSAGIFGADPIHSLRVCVDTVRTNVYLAVFDKNLYDKLVSSFLEMKSEKQVEQKIAEIPKEEVKPFITESKPSVEQRKQDDKKIKACVEEVTTTLEETKFLTENLLLYIDINGNLHPDSATLVSDIDITFLKKDAPYIVGDVVQEGVLTAVVIPTKKAGGTTEMLAKALRKVPTDNYITTYPGQGLNGYTVEEAKTVLKKCKSAFYILPSIISNEKQEILGTVSWNLREMLAHAEETRKLMPVCVETKAIVSTIQRKYKGIKIQEGVVDYGARFYFYTSKTTVASLINTLNDLNETLVTMPLGYVTHGLNLEEAARYMRSLKVPATVSVSSPDAVTAYNGYLTSSSKTPEEHFIETISLAGSYKDWSYSGQSTQLGIEFLKRGDKSVYYTSNPTTFHLDGEVITFDNLKTLLSLREVRTIKVFTTVDNINLHTQVVDMSMTYGQQFGPTYLDGADVTKIKPHNSHEGKTFYVLPNDDTLRVEAFEYYHTTDPSFLGRYMSALNHTKKWKYPQVNGLTSIKWADNNCYLATALLTLQQIELKFNPPALQDAYYRARAGEADNFCALILAYCNKTVGELGDVRETMSYLFQHANLDSCKRVLNVVCKTCGQQQTTLKGVEAVMYMGTLSYEQFKKGVQIPCTCGKQATKYLVQQESPFVMMSAPPAQYELKHGTFTCASEYTGNYQCGHYKHITSKETLYCIDGALLTKSSEYKGPITDVFYKENSYTTTIKPVTYKLDGVVCTEIDPKLDNYYKKDNSYFTEQPIDLVPNQPYPNASFDNFKFVCDNIKFADDLNQLTGYKKPASRELKVTFFPDLNGDVVAIDYKHYTPSFKKGAKLLHKPIVWHVNNATNKATYKPNTWCIRCLWSTKPVETSNSFDVLKSEDAQGMDNLACEDLKPVSEEVVENPTIQKDVLECNVKTTEVVGDIILKPANNSLKITEEVGHTDLMAAYVDNSSLTIKKPNELSRVLGLKTLATHGLAAVNSVPWDTIANYAKPFLNKVVSTTTNIVTRCLNRVCTNYMPYFFTLLLQLCTFTRSTNSRIKASMPTTIAKNTVKSVGKFCLEASFNYLKSPNFSKLINITIWFLLLSVCLGSLIYSTAALGVLMSNLGMPSYCTGYREGYLNSTNVTIATYCTGSIPCSVCLSGLDSLDTYPSLETIQITISSFKWDLTAFGLVAEWFLAYILFTRFFYVLGLAAIMQLFFSYFAVHFISNSWLMWLIINLVQMAPISAMVRMYIFFASFYYVWKSYVHVVDGCNSSTCMMCYKRNRATRVECTTIVNGVRRSFYVYANGGKGFCKLHNWNCVNCDTFCAGSTFISDEVARDLSLQFKRPINPTDQSSYIVDSVTVKNGSIHLYFDKAGQKTYERHSLSHFVNLDNLRANNTKGSLPINVIVFDGKSKCEESSAKSASVYYSQLMCQPILLLDQALVSDVGDSAEVAVKMFDAYVNTFSSTFNVPMEKLKTLVATAEAELAKNVSLDNVLSTFISAARQGFVDSDVETKDVVECLKLSHQSDIEVTGDSCNNYMLTYNKVENMTPRDLGACIDCSARHINAQVAKSHNIALIWNVKDFMSLSEQLRKQIRSAAKKNNLPFKLTCATTRQVVNVVTTKIALKGGKIVNNWLKQLIKVTLVFLFVAAIFYLITPVHVMSKHTDFSSEIIGYKAIDGGVTRDIASTDTCFANKHADFDTWFSQRGGSYTNDKACPLIAAVITREVGFVVPGLPGTILRTTNGDFLHFLPRVFSAVGNICYTPSKLIEYTDFATSACVLAAECTIFKDASGKPVPYCYDTNVLEGSVAYESLRPDTRYVLMDGSIIQFPNTYLEGSVRVVTTFDSEYCRHGTCERSEAGVCVSTSGRWVLNNDYYRSLPGVFCGVDAVNLLTNMFTPLIQPIGALDISASIVAGGIVAIVVTCLAYYFMRFRRAFGEYSHVVAFNTLLFLMSFTVLCLTPVYSFLPGVYSVIYLYLTFYLTNDVSFLAHIQWMVMFTPLVPFWITIAYIICISTKHFYWFFSNYLKRRVVFNGVSFSTFEEAALCTFLLNKEMYLKLRSDVLLPLTQYNRYLALYNKYKYFSGAMDTTSYREAACCHLAKALNDFSNSGSDVLYQPPQTSITSAVLQSGFRKMAFPSGKVEGCMVQVTCGTTTLNGLWLDDVVYCPRHVICTSEDMLNPNYEDLLIRKSNHNFLVQAGNVQLRVIGHSMQNCVLKLKVDTANPKTPKYKFVRIQPGQTFSVLACYNGSPSGVYQCAMRPNFTIKGSFLNGSCGSVGFNIDYDCVSFCYMHHMELPTGVHAGTDLEGNFYGPFVDRQTAQAAGTDTTITVNVLAWLYAAVINGDRWFLNRFTTTLNDFNLVAMKYNYEPLTQDHVDILGPLSAQTGIAVLDMCASLKELLQNGMNGRTILGSALLEDEFTPFDVVRQCSGVTFQSAVKRTIKGTHHWLLLTILTSLLVLVQSTQWSLFFFLYENAFLPFAMGIIAMSAFAMMFVKHKHAFLCLFLLPSLATVAYFNMVYMPASWVMRIMTWLDMVDTSLKLKDCVMYASAVVLLILMTARTVYDDGARRVWTLMNVLTLVYKVYYGNALDQAISMWALIISVTSNYSGVVTTVMFLARGIVFMCVEYCPIFFITGNTLQCIMLVYCFLGYFCTCYFGLFCLLNRYFRLTLGVYDYLVSTQEFRYMNSQGLLPPKNSIDAFKLNIKLLGVGGKPCIKVATVQSKMSDVKCTSVVLLSVLQQLRVESSSKLWAQCVQLHNDILLAKDTTEAFEKMVSLLSVLLSMQGAVDINKLCEEMLDNRATLQAIASEFSSLPSYAAFATAQEAYEQAVANGDSEVVLKKLKKSLNVAKSEFDRDAAMQRKLEKMADQAMTQMYKQARSEDKRAKVTSAMQTMLFTMLRKLDNDALNNIINNARDGCVPLNIIPLTTAAKLMVVIPDYNTYKNTCDGTTFTYASALWEIQQVVDADSKIVQLSEISMDNSPNLAWPLIVTALRANSAVKLQNNELSPVALRQMSCAAGTTQTACTDDNALAYYNTTKGGRFVLALLSDLQDLKWARFPKSDGTGTIYTELEPPCRFVTDTPKGPKVKYLYFIKGLNNLNRGMVLGSLAATVRLQAGNATEVPANSTVLSFCAFAVDAAKAYKDYLASGGQPITNCVKMLCTHTGTGQAITVTPEANMDQESFGGASCCLYCRCHIDHPNPKGFCDLKGKYVQIPTTCANDPVGFTLKNTVCTVCGMWKGYGCSCDQLREPMLQSADAQSFLNGFAV

SEQ ID NO: 403 - protein, 1270 aa, Severe acute respiratory syndrome coronavirus 2
MFVFLVLLPLVSSQCVNLTTRTQLPPAYTNSFTRGVYYPDKVFRSSVLHSTQDLFLPFFSNVTWFHAISGTNGTKRFDNPVLPFNDGVYFASTEKSNIIRGWIFGTTLDSKTQSLLIVNNATNVVIKVCEFQFCNDPFLGVYHKNNKSWMESEFRVYSSANNCTFEYVSQPFLMDLEGKQGNFKNLREFVFKNIDGYFKIYSKHTPINLVRDLPQGFSALEPLVDLPIGINITRFQTLLALHRSYLTPGDSSSGWTAGAAAYYVGYLQPRTFLLKYNENGTITDAVDCALDPLSETKCTLKSFTVEKGIYQTSNFRVQPTESIVRFPNITNLCPFGEVFNATRFASVYAWNRKRISNCVADYSVLYNSASFSTFKCYGVSPTKLNDLCFTNVYADSFVIRGDEVRQIAPGQTGKIADYNYKLPDDFTGCVIAWNSNNLDSKVGGNYNYLYRLFRKSNLKPFERDISTEIYQAGSTPCNGVEGFNCYFPLQSYGFQPTYGVGYQPYRVVVLSFELLHAPATVCGPKKSTNLVKNKCVNFNFNGLTGTGVLTESNKKFLPFQQFGRDIDDTTDAVRDPQTLEILDITPCSFGGVSVITPGTNTSNQVAVLYQGVNCTEVPVAIHADQLTPTWRVYSTGSNVFQTRAGCLIGAEHVNNSYECDIPIGAGICASYQTQTNSHRRARSVASQSIIAYTMSLGAENSVAYSNNSIAIPINFTISVTTEILPVSMTKTSVDCTMYICGDSTECSNLLLQYGSFCTQLNRALTGIAVEQDKNTQEVFAQVKQIYKTPPIKDFGGFNFSQILPDPSKPSKRSFIEDLLFNKVTLADAGFIKQYGDCLGDIAARDLICAQKFNGLTVLPPLLTDEMIAQYTSALLAGTITSGWTFGAGAALQIPFAMQMAYRFNGIGVTQNVLYENQKLIANQFNSAIGKIQDSLSSTASALGKLQDVVNQNAQALNTLVKQLSSNFGAISSVLNDILARLDKVEAEVQIDRLITGRLQSLQTYVTQQLIRAAEIRASANLAATKMSECVLGQSKRVDFCGKGYHLMSFPQSAPHGVVFLHVTYVPAQEKNFTTAPAICHDGKAHFPREGVFVSNGTHWFVTQRNFYEPQIITTHNTFVSGNCDVVIGIVNNTVYDPLQPELDSFKEELDKYFKNHTSPDVDLGDISGINASVVNIQKEIDRLNEVAKNLNESLIDLQELGKYEQYIKWPWYIWLGFIAGLIAIVMVTIMLCCMTSCCSCLKGCCSCGSCCKFDEDDSEPVLKGVKLHYT

SEQ ID NO: 404 - protein, 275 aa, Severe acute respiratory syndrome coronavirus 2
MDLFMRIFTIGTVTLKQGEIKDATPSDFVRATATIPIQASLPFGWLIVGVALLAVFQSASKIITLKKRWQLALSKGVHFVCNLLLLFVTVYSHLLLVAAGLEAPFLYLYALVYFLQSINFVRIIMRLWLCWKCRSKNPLLYDANYFLCWHTNCYDYCIPYNSVTSSIVITSGDGTTSPISEHDYQIGGYTEKWESGVKDCVVLHSYFTSDYYQLYSTQLSTDTGVEHVTFFIYNKIVDEPEEHVQIHTIDGSSGVVNPVMEPIYDEPTTTTSVPL

SEQ ID NO: 405 - protein, 75 aa, Severe acute respiratory syndrome coronavirus 2
MYSFVSEETGTLIVNSVLLFLAFVVFLLVTLAILTALRLCAYCCNIVNVSLVKPSFYVYSRVKNLNSSRVPDLLV

SEQ ID NO: 406 - protein, 222 aa, Severe acute respiratory syndrome coronavirus 2
MADSNGTITVEELKKLLEQWNLVIGFLFLTWICLLQFAYANRNRFLYIIKLIFLWLLWPVTLACFVLAAVYRINWITGGIAIAMACLVGLMWLSYFIASFRLFARTRSMWSFNPETNILLNVPLHGTILTRPLLESELVIGAVILRGHLRIAGHHLGRCDIKDLPKEITVATSRTLSYYKLGASQRVAGDSGFAAYSRYRIGNYKLNTDHSSSSDNIALLVQ

SEQ ID NO: 407 - protein, 61 aa, Severe acute respiratory syndrome coronavirus 2
MFHLVDFQVTIAEILLIIMRTFKVSIWNLDYIINLIIKNLSKSLTENKYSQLDEEQPMEID

SEQ ID NO: 408 - protein, 121 aa, Severe acute respiratory syndrome coronavirus 2
MKIILFLALITLATCELYHYQECVRGTTVLLKEPCSSGTYEGNSPFHPLADNKFALTCFSTQFAFACPDGVKHVYQLRARSVSPKLFIRQEEVQELYSPIFLIVAAIVFITLCFTLKRKTE

SEQ ID NO: 409 - protein, 43 aa, Severe acute respiratory syndrome coronavirus 2
MIELSLIDFYLCFLAFLLFLVLIMLIIFWFSLELQDHNETCHA

SEQ ID NO: 410 - protein, 26 aa, Severe acute respiratory syndrome coronavirus 2
MKFLVFLGIITTVAAFHQECSLQSCT

SEQ ID NO: 411 - protein, 419 aa, Severe acute respiratory syndrome coronavirus 2
MSLNGPQNQRNAPRITFGGPSDSTGSNQNGERSGARSKQRRPQGLPNNTASWFTALTQHGKEDLKFPRGQGVPINTNSSPDDQIGYYRRATRRIRGGDGKMKDLSPRWYFYYLGTGPEAGLPYGANKDGIIWVATEGALNTPKDHIGTRNPANNAAIVLQLPQGTTLPKGFYAEGSRGGSQASSRSSSRSRNSSRNSTPGSSKRTSPARMAGNGGDAALALLLLDRLNQLESKMFGKGQQQQGQTVTKKSAAEASKKPRQKRTATKAYNVTQAFGRRGPEQTQGNFGDQELIRQGTDYKHWPQIAQFAPSASAFFGMSRIGMEVTPSGTWLTYTGAIKLDDKDPNFKDQVILLNKHIDAYKTFPPTEPKKDKKKKADETQALPQRQKKQQTVTLLPAADLDDFSKQLQQSMSSADSTQA

SEQ ID NO: 412 - protein, 38 aa, Severe acute respiratory syndrome coronavirus 2
MGYINVFAFPFTIYSLLLCRMNSRNYIAQVDVVNFNLT

SEQ ID NO: 413 - protein, 7096 aa, Severe acute respiratory syndrome coronavirus 2
MESLVPGFNEKTHVQLSLPVLQVRDVLVRGFGDSVEEVLSEARQHLKDGTCGLVEVEKGVLPQLEQPYVFIKRSDARTAPHGHVMVELVAELEGIQYGRSGETLGVLVPHVGEIPVAYRKVLLRKNGNKGAGGHSYGADLKSFDLGDELGTDPYEDFQENWNTKHSSGVTRELMRELNGGAYTRYVDNNFCGPDGYPLECIKDLLARAGKASCTLSEQLDFIDTKRGVYCCREHEHEIAWYTERSEKSYELQTPFEIKLAKKFDTFNGECPNFVFPLNSIIKTIQPRVEKKKLDGFMGRIRSVYPVASPNECNQMCLSTLMKCDHCGETSWQTGDFVKATCEFCGTENLTKEGATTCGYLPQNAVVKIYCPACHNSEVGPEHSLAEYHNESGLKTILRKGGRTIAFGGCVFSYVGCHNKCAYWVPRASANIGCNHTGVVGEGSEGLNDNLLEILQKEKVNINIVGDFKLNEEIAIILASFSASTSAFVETVKGLDYKAFKQIVESCGNFKVTKGKAKKGAWNIGEQKSILSPLYAFASEAARVVRSIFSRTLETAQNSVRVLQKAAITILDGISQYSLRLIDAMMFTSDLATNNLVVMAYITGGVVQLTSQWLTNIFGTVYEKLKPVLDWLEEKFKEGVEFLRDGWEIVKFISTCACEIVGGQIVTCAKEIKESVQTFFKLVNKFLALCADSIIIGGAKLKALNLGETFVTHSKGLYRKCVKSREETGLLMPLKAPKEIIFLEGETLPTEVLTEEVVLKTGDLQPLEQPTSEAVEAPLVGTPVCINGLMLLEIKDTEKYCALAPNMMVTNNTFTLKGGAPTKVTFGDDTVIEVQGYKSVNITFELDERIDKVLNEKCSAYTVELGTEVNEFACVVADAVIKTLQPVSELLTPLGIDLDEWSMATYYLFDESGEFKLASHMYCSFYPPDEDEEEGDCEEEEFEPSTQYEYGTEDDYQGKPLEFGATSAALQPEEEQEEDWLDDDSQQTVGQQDGSEDNQTTTIQTIVEVQPQLEMELTPVVQTIEVNSFSGYLKLTDNVYIKNADIVEEAKKVKPTVVVNAANVYLKHGGGVAGALNKATNNAMQVESDDYIATNGPLKVGGSCVLSGHNLAKHCLHVVGPNVNKGEDIQLLKSAYENFNQHEVLLAPLLSAGIFGADPIHSLRVCVDTVRTNVYLAVFDKNLYDKLVSSFLEMKSEKQVEQKIAEIPKEEVKPFITESKPSVEQRKQDDKKIKACVEEVTTTLEETKFLTENLLLYIDINGNLHPDSATLVSDIDITFLKKDAPYIVGDVVQEGVLTAVVIPTKKAGGTTEMLAKALRKVPTDNYITTYPGQGLNGYTVEEAKTVLKKCKSAFYILPSIISNEKQEILGTVSWNLREMLAHAEETRKLMPVCVETKAIVSTIQRKYKGIKIQEGVVDYGARFYFYTSKTTVASLINTLNDLNETLVTMPLGYVTHGLNLEEAARYMRSLKVPATVSVSSPDAVTAYNGYLTSSSKTPEEHFIETISLAGSYKDWSYSGQSTQLGIEFLKRGDKSVYYTSNPTTFHLDGEVITFDNLKTLLSLREVRTIKVFTTVDNINLHTQVVDMSMTYGQQFGPTYLDGADVTKIKPHNSHEGKTFYVLPNDDTLRVEAFEYYHTTDPSFLGRYMSALNHTKKWKYPQVNGLTSIKWADNNCYLATALLTLQQIELKFNPPALQDAYYRARAGEAANFCALILAYCNKTVGELGDVRETMSYLFQHANLDSCKRVLNVVCKTCGQQQTTLKGVEAVMYMGTLSYEQFKKGVQIPCTCGKQATKYLVQQESPFVMMSAPPAQYELKHGTFTCASEYTGNYQCGHYKHITSKETLYCIDGALLTKSSEYKGPITDVFYKENSYTTTIKPVTYKLDGVVCTEIDPKLDNYYKKDNSYFTEQPIDLVPNQPYPNASFDNFKFVCDNIKFADDLNQLTGYKKPASRELKVTFFPDLNGDVVAIDYKHYTPSFKKGAKLLHKPIVWHVNNATNKATYKPNTWCIRCLWSTKPVETSNSFDVLKSEDAQGMDNLACEDLKPVSEEVVENPTIQKDVLECNVKTTEVVGDIILKPANNSLKITEEVGHTDLMAAYVDNSSLTIKKPNELSRVLGLKTLATHGLAAVNSVPWDTIANYAKPFLNKVVSTTTNIVTRCLNRVCTNYMPYFFTLLLQLCTFTRSTNSRIKASMPTTIAKNTVKSVGKFCLEASFNYLKSPNFSKLINIIIWFLLLSVCLGSLIYSTAALGVLMSNLGMPSYCTGYREGYLNSTNVTIATYCTGSIPCSVCLSGLDSLDTYPSLETIQITISSFKWDLTAFGLVAEWFLAYILFTRFFYVLGLAAIMQLFFSYFAVHFISNSWLMWLIINLVQMAPISAMVRMYIFFASFYYVWKSYVHVVDGCNSSTCMMCYKRNRATRVECTTIVNGVRRSFYVYANGGKGFCKLHNWNCVNCDTFCAGSTFISDEVARDLSLQFKRPINPTDQSSYIVDSVTVKNGSIHLYFDKAGQKTYERHSLSHFVNLDNLRANNTKGSLPINVIVFDGKSKCEESSAKSASVYYSQLMCQPILLLDQALVSDVGDSAEVAVKMFDAYVNTFSSTFNVPMEKLKTLVATAEAELAKNVSLDNVLSTFISAARQGFVDSDVETKDVVECLKLSHQSDIEVTGDSCNNYMLTYNKVENMTPRDLGACIDCSARHINAQVAKSHNIALIWNVKDFMSLSEQLRKQIRSAAKKNNLPFKLTCATTRQVVNVVTTKIALKGGKIVNNWLKQLIKVTLVFLFVAAIFYLITPVHVMSKHTDFSSEIIGYKAIDGGVTRDIASTDTCFANKHADFDTWFSQRGGSYTNDKACPLIAAVITREVGFVVPGLPGTILRTTNGDFLHFLPRVFSAVGNICYTPSKLIEYTDFATSACVLAAECTIFKDASGKPVPYCYDTNVLEGSVAYESLRPDTRYVLMDGSIIQFPNTYLEGSVRVVTTFDSEYCRHGTCERSEAGVCVSTSGRWVLNNDYYRSLPGVFCGVDAVNLLTNMFTPLIQPIGALDISASIVAGGIVAIVVTCLAYYFMRFRRAFGEYSHVVAFNTLLFLMSFTVLCLTPVYSFLPGVYSVIYLYLTFYLTNDVSFLAHIQWMVMFTPLVPFWITIAYIICISTKHFYWFFSNYLKRRVVFNGVSFSTFEEAALCTFLLNKEMYLKLRSDVLLPLTQYNRYLALYNKYKYFSGAMDTTSYREAACCHLAKALNDFSNSGSDVLYQPPQTSITSAVLQSGFRKMAFPSGKVEGCMVQVTCGTTTLNGLWLDDVVYCPRHVICTSEDMLNPNYEDLLIRKSNHNFLVQAGNVQLRVIGHSMQNCVLKLKVDTANPKTPKYKFVRIQPGQTFSVLACYNGSPSGVYQCAMRPNFTIKGSFLNGSCGSVGFNIDYDCVSFCYMHHMELPTGVHAGTDLEGNFYGPFVDRQTAQAAGTDTTITVNVLAWLYAAVINGDRWFLNRFTTTLNDFNLVAMKYNYEPLTQDHVDILGPLSAQTGIAVLDMCASLKELLQNGMNGRTILGSALLEDEFTPFDVVRQCSGVTFQSAVKRTIKGTHHWLLLTILTSLLVLVQSTQWSLFFFLYENAFLPFAMGIIAMSAFAMMFVKHKHAFLCLFLLPSLATVAYFNMVYMPASWVMRIMTWLDMVDTSLSGFKLKDCVMYASAVVLLILMTARTVYDDGARRVWTLMNVLTLVYKVYYGNALDQAISMWALIISVTSNYSGVVTTVMFLARGIVFMCVEYCPIFFITGNTLQCIMLVYCFLGYFCTCYFGLFCLLNRYFRLTLGVYDYLVSTQEFRYMNSQGLLPPKNSIDAFKLNIKLLGVGGKPCIKVATVQSKMSDVKCTSVVLLSVLQQLRVESSSKLWAQCVQLHNDILLAKDTTEAFEKMVSLLSVLLSMQGAVDINKLCEEMLDNRATLQAIASEFSSLPSYAAFATAQEAYEQAVANGDSEVVLKKLKKSLNVAKSEFDRDAAMQRKLEKMADQAMTQMYKQARSEDKRAKVTSAMQTMLFTMLRKLDNDALNNIINNARDGCVPLNIIPLTTAAKLMVVIPDYNTYKNTCDGTTFTYASALWEIQQVVDADSKIVQLSEISMDNSPNLAWPLIVTALRANSAVKLQNNELSPVALRQMSCAAGTTQTACTDDNALAYYNTTKGGRFVLALLSDLQDLKWARFPKSDGTGTIYTELEPPCRFVTDTPKGPKVKYLYFIKGLNNLNRGMVLGSLAATVRLQAGNATEVPANSTVLSFCAFAVDAAKAYKDYLASGGQPITNCVKMLCTHTGTGQAITVTPEANMDQESFGGASCCLYCRCHIDHPNPKGFCDLKGKYVQIPTTCANDPVGFTLKNTVCTVCGMWKGYGCSCDQLREPMLQSADAQSFLNRVCGVSAARLTPCGTGTSTDVVYRAFDIYNDKVAGFAKFLKTNCCRFQEKDEDDNLIDSYFVVKRHTFSNYQHEETIYNLLKDCPAVAKHDFFKFRIDGDMVPHISRQRLTKYTMADLVYALRHFDEGNCDTLKEILVTYNCCDDDYFNKKDWYDFVENPDILRVYANLGERVRQALLKTVQFCDAMRNAGIVGVLTLDNQDLNGNWYDFGDFIQTTPGSGVPVVDSYYSLLMPILTLTRALTAESHVDTDLTKPYIKWDLLKYDFTEERLKLFDRYFKYWDQTYHPNCVNCLDDRCILHCANFNVLFSTVFPLTSFGPLVRKIFVDGVPFVVSTGYHFRELGVVHNQDVNLHSSRLSFKELLVYAADPAMHAASGNLLLDKRTTCFSVAALTNNVAFQTVKPGNFNKDFYDFAVSKGFFKEGSSVELKHFFFAQDGNAAISDYDYYRYNLPTMCDIRQLLFVVEVVDKYFDCYDGGCINANQVIVNNLDKSAGFPFNKWGKARLYYDSMSYEDQDALFAYTKRNVIPTITQMNLKYAISAKNRARTVAGVSICSTMTNRQFHQKLLKSIAATRGATVVIGTSKFYGGWHNMLKTVYSDVENPHLMGWDYPKCDRAMPNMLRIMASLVLARKHTTCCSLSHRFYRLANECAQVLSEMVMCGGSLYVKPGGTSSGDATTAYANSVFNICQAVTANVNALLSTDGNKIADKYVRNLQHRLYECLYRNRDVDTDFVNEFYAYLRKHFSMMILSDDAVVCFNSTYASQGLVASIKNFKSVLYYQNNVFMSEAKCWTETDLTKGPHEFCSQHTMLVKQGDDYVYLPYPDPSRILGAGCFVDDIVKTDGTLMIERFVSLAIDAYPLTKHPNQEYADVFHLYLQYIRKLHDELTGHMLDMYSVMLTNDNTSRYWEPEFYEAMYTPHTVLQAVGACVLCNSQTSLRCGACIRRPFLCCKCCYDHVISTSHKLVLSVNPYVCNAPGCDVTDVTQLYLGGMSYYCKSHKPPISFPLCANGQVFGLYKNTCVGSDNVTDFNAIATCDWTNAGDYILANTCTERLKLFAAETLKATEETFKLSYGIATVREVLSDRELHLSWEVGKPRPPLNRNYVFTGYRVTKNSKVQIGEYTFEKGDYGDAVVYRGTTTYKLNVGDYFVLTSHTVMPLSAPTLVPQEHYVRITGLYPTLNISDEFSSNVANYQKVGMQKYSTLQGPPGTGKSHFAIGLALYYPSARIVYTACSHAAVDALCEKALKYLPIDKCSRIIPARARVECFDKFKVNSTLEQYVFCTVNALPETTADIVVFDEISMATNYDLSVVNARLRAKHYVYIGDPAQLPAPRTLLTKGTLEPEYFNSVCRLMKTIGPDMFLGTCRRCPAEIVDTVSALVYDNKLKAHKDKSAQCFKMFYKGVITHDVSSAINRPQIGVVREFLTRNPAWRKAVFISPYNSQNAVASKILGLPTQTVDSSQGSEYDYVIFTQTTETAHSCNVNRFNVAITRAKVGILCIMSDRDLYDKLQFTSLEIPRRNVATLQAENVTGLFKDCSKVITGLHPTQAPTHLSVDTKFKTEGLCVDIPGIPKDMTYRRLISMMGFKMNYQVNGYPNMFITREEAIRHVRAWIGFDVEGCHATREAVGTNLPLQLGFSTGVNLVAVPTGYVDTPNNTDFSRVSAKPPPGDQFKHLIPLMYKGLPWNVVRIKIVQMLSDTLKNLSDRVVFVLWAHGFELTSMKYFVKIGPERTCCLCDRRATCFSTASDTYACWHHSIGFDYVYNPFMIDVQQWGFTGNLQSNHDLYCQVHGNAHVASCDAIMTRCLAVHECFVKRVDWTIEYPIIGDELKINAACRKVQHMVVKAALLADKFPVLHDIGNPKAIKCVPQADVEWKFYDAQPCSDKAYKIEELFYSYATHSDKFTDGVCLFWNCNVDRYPANSIVCRFDTRVLSNLNLPGCDGGSLYVNKHAFHTPAFDKSAFVNLKQLPFFYYSDSPCESHGKQVVSDIDYVPLKSATCITRCNLGGAVCRHHANEYRLYLDAYNMMISAGFSLWVYKQFDTYNLWNTFTRLQSLENVAFNVVNKGHFDGQQGEVPVSIINNTVYTKVDGVDVELFENKTTLPVNVAFELWAKRNIKPVPEVKILNNLGVDIAANTVIWDYKRDAPAHISTIGVCSMTDIAKKPTETICAPLTVFFDGRVDGQVDLFRNARNGVLITEGSVKGLQPSVGPKQASLNGVTLIGEAVKTQFNYYKKVDGVVQQLPETYFTQSRNLQEFKPRSQMEIDFLELAMDEFIERYKLEGYAFEHIVYGDFSHSQLGGLHLLIGLAKRFKESPFELEDFIPMDSTVKNYFITDAQTGSSKCVCSVIDLLLDDFVEIIKSQDLSVVSKVVKVTIDYTEISFMLWCKDGHVETFYPKLQSSQAWQPGVAMPNLYKMQRMLLEKCDLQNYGDSATLPKGIMMNVAKYTQLCQYLNTLTLAVPYNMRVIHFGAGSDKGVAPGTAVLRQWLPTGTLLVDSDLNDFVSDADSTLIGDCATVHTANKWDLIISDMYDPKTKNVTKENDSKEGFFTYICGFIQQKLALGGSVAIKITEHSWNADLYKLMGHFAWWTAFVTNVNASSSEAFLIGCNYLGKPREQIDGYVMHANYIFWRNTNPIQLSSYSLFDMSKFPLKLRGTAVMSLKEGQINDMILSLLSKGRLIIRENNRVVISSDVLVNN

SEQ ID NO: 414 - protein, 4405 aa, Severe acute respiratory syndrome coronavirus 2 [sequence omitted]

SEQ ID NO: 415 - protein, 1273 aa, Severe acute respiratory syndrome coronavirus 2
MFVFLVLLPLVSSQCVNLTTRTQLPPAYTNSFTRGVYYPDKVFRSSVLHSTQDLFLPFFSNVTWFHAIHVSGTNGTKRFDNPVLPFNDGVYFASTEKSNIIRGWIFGTTLDSKTQSLLIVNNATNVVIKVCEFQFCNDPFLGVYYHKNNKSWMESEFRVYSSANNCTFEYVSQPFLMDLEGKQGNFKNLREFVFKNIDGYFKIYSKHTPINLVRDLPQGFSALEPLVDLPIGINITRFQTLLALHRSYLTPGDSSSGWTAGAAAYYVGYLQPRTFLLKYNENGTITDAVDCALDPLSETKCTLKSFTVEKGIYQTSNFRVQPTESIVRFPNITNLCPFGEVFNATRFASVYAWNRKRISNCVADYSVLYNSASFSTFKCYGVSPTKLNDLCFTNVYADSFVIRGDEVRQIAPGQTGKIADYNYKLPDDFTGCVIAWNSNNLDSKVGGNYNYLYRLFRKSNLKPFERDISTEIYQAGSTPCNGVEGFNCYFPLQSYGFQPTNGVGYQPYRVVVLSFELLHAPATVCGPKKSTNLVKNKCVNFNFNGLTGTGVLTESNKKFLPFQQFGRDIADTTDAVRDPQTLEILDITPCSFGGVSVITPGTNTSNQVAVLYQGVNCTEVPVAIHADQLTPTWRVYSTGSNVFQTRAGCLIGAEHVNNSYECDIPIGAGICASYQTQTNSPRRARSVASQSIIAYTMSLGAENSVAYSNNSIAIPTNFTISVTTEILPVSMTKTSVDCTMYICGDSTECSNLLLQYGSFCTQLNRALTGIAVEQDKNTQEVFAQVKQIYKTPPIKDFGGFNFSQILPDPSKPSKRSFIEDLLFNKVTLADAGFIKQYGDCLGDIAARDLICAQKFNGLTVLPPLLTDEMIAQYTSALLAGTITSGWTFGAGAALQIPFAMQMAYRFNGIGVTQNVLYENQKLIANQFNSAIGKIQDSLSSTASALGKLQDVVNQNAQALNTLVKQLSSNFGAISSVLNDILSRLDKVEAEVQIDRLITGRLQSLQTYVTQQLIRAAEIRASANLAATKMSECVLGQSKRVDFCGKGYHLMSFPQSAPHGVVFLHVTYVPAQEKNFTTAPAICHDGKAHFPREGVFVSNGTHWFVTQRNFYEPQIITTDNTFVSGNCDVVIGIVNNTVYDPLQPELDSFKEELDKYFKNHTSPDVDLGDISGINASVVNIQKEIDRLNEVAKNLNESLIDLQELGKYEQYIKWPWYIWLGFIAGLIAIVMVTIMLCCMTSCCSCLKGCCSCGSCCKFDEDDSEPVLKGVKLHYT

SEQ ID NO: 416 - protein, 275 aa, Severe acute respiratory syndrome coronavirus 2; identical to SEQ ID NO: 404

SEQ ID NO: 417 - protein, 75 aa, Severe acute respiratory syndrome coronavirus 2; identical to SEQ ID NO: 405

SEQ ID NO: 418 - protein, 222 aa, Severe acute respiratory syndrome coronavirus 2; identical to SEQ ID NO: 406

SEQ ID NO: 419 - protein, 61 aa, Severe acute respiratory syndrome coronavirus 2; identical to SEQ ID NO: 407

SEQ ID NO: 420 - protein, 121 aa, Severe acute respiratory syndrome coronavirus 2; identical to SEQ ID NO: 408

SEQ ID NO: 421 - protein, 43 aa, Severe acute respiratory syndrome coronavirus 2; identical to SEQ ID NO: 409

SEQ ID NO: 422 - protein, 121 aa, Severe acute respiratory syndrome coronavirus 2
MKFLVFLGIITTVAAFHQECSLQSCTQHQPYVVDDPCPIHFYSKWYIRVGARKSAPLIELCVDEAGSKSPIQYIDIGNYTVSCLPFTINCQEPKLGSLVVRCSFYEDFLEYHDVRVVLDFI

SEQ ID NO: 423 - protein, 419 aa, Severe acute respiratory syndrome coronavirus 2
MSDNGPQNQRNAPRITFGGPSDSTGSNQNGERSGARSKQRRPQGLPNNTASWFTALTQHGKEDLKFPRGQGVPINTNSSPDDQIGYYRRATRRIRGGDGKMKDLSPRWYFYYLGTGPEAGLPYGANKDGIIWVATEGALNTPKDHIGTRNPANNAAIVLQLPQGTTLPKGFYAEGSRGGSQASSRSSSRSRNSSRNSTPGSSRGTSPARMAGNGGDAALALLLLDRLNQLESKMSGKGQQQQGQTVTKKSAAEASKKPRQKRTATKAYNVTQAFGRRGPEQTQGNFGDQELIRQGTDYKHWPQIAQFAPSASAFFGMSRIGMEVTPSGTWLTYTGAIKLDDKDPNFKDQVILLNKHIDAYKTFPPTEPKKDKKKKADETQALPQRQKKQQTVTLLPAADLDDFSKQLQQSMSSADSTQA

SEQ ID NO: 424 - protein, 38 aa, Severe acute respiratory syndrome coronavirus 2; identical to SEQ ID NO: 412

SEQ ID NO: 425 - protein, 7096 aa, Severe acute respiratory syndrome coronavirus 2; identical to SEQ ID NO: 413

SEQ ID NO: 426 - protein, 4405 aa, Severe acute respiratory syndrome coronavirus 2 [sequence omitted]

SEQ ID NO: 427 - protein, 1273 aa, Severe acute respiratory syndrome coronavirus 2; identical to SEQ ID NO: 415

SEQ ID NO: 428 - protein, 275 aa, Severe acute respiratory syndrome coronavirus 2; identical to SEQ ID NO: 404

SEQ ID NO: 429 - DNA, 669 bp, Severe acute respiratory syndrome coronavirus 2; identical to SEQ ID NO: 306
  source 1..669: mol_type = unassigned DNA

SEQ ID NO: 430 - protein, 222 aa, Severe acute respiratory syndrome coronavirus 2; identical to SEQ ID NO: 406

SEQ ID NO: 431 - protein, 61 aa, Severe acute respiratory syndrome coronavirus 2
MFHLVDFQVTIAEILLIIMRTFKVSIWNLDYITNLIIKNLSKSLTENKYSQLDEEQPMEID

SEQ ID NO: 432 - protein, 121 aa, Severe acute respiratory syndrome coronavirus 2; identical to SEQ ID NO: 408

SEQ ID NO: 433 - protein, 43 aa, Severe acute respiratory syndrome coronavirus 2; identical to SEQ ID NO: 409

SEQ ID NO: 434 - protein, 121 aa, Severe acute respiratory syndrome coronavirus 2; identical to SEQ ID NO: 422

SEQ ID NO: 435 - protein, 419 aa, Severe acute respiratory syndrome coronavirus 2
MSDNGPQNQRNAPRITFGGPSDSTGSNQNGERSGARSKQRRPQGLPNNTASWFTALTQHGKEDLKFPRGQGVPINTNSSPDDQIGYYRRATRRIRGGDGKMKDLSPRWYFYYLGTGPEAGLPYGANKDGIIWVATEGALNTPKDHIGTRNPANNAAIVLQLPQGTTLPKGFYAEGSRGGSQASSRSSSRSRNSSRNSTPGSSKRTSPARMAGNGGDAALALLLLDRLNQLESKMSGKGQQQQGQTVTKKSAAEASKKPRQKRTATKAYNVTQAFGRRGPEQTQGNFGDQELTRQGTDYKHWPQIAQFAPSASAFFGMSRIGMEVTPSGTWLTYTGAIKLDDKDPNFKDQVILLNKHIDAYKTFPPTEPKKDKKKKADETQALPQRQKKQQTVTLLPAADLDDFSKQLQQSMSSADSTQA

SEQ ID NO: 436 - protein, 38 aa, Severe acute respiratory syndrome coronavirus 2; identical to SEQ ID NO: 412

SEQ ID NO: 437 - protein, 4405 aa, Severe acute respiratory syndrome coronavirus 2
MESLVPGFNEKTHVQLSLPVLQVRDVLVRGFGDSVEEVLSEARQHLKDGTCGLVEVEKGVLPQLEQPYVFIKRSDARTAPHGHVMVELVAELEGIQYGRSGETLGVLVPHVGEIPVAYRKVLLRKNGNKGAGGHSYGADLKSFDLGDELGTDPYEDFQENWNTKHSSGVTRELMRELNGGAYTRYVDNNFCGPDGYPLECIKDLLARAGKASCTLSEQLDFIDTKRGVYCCREHEHEIAWYTERSEKSYELQTPFEIKLAKKFDIFNGECPNFVFPLNSIIKTIQPRVEKKKLDGFMGRIRSVYPVASPNECNQMCLSTLMKCDHCGETSWQTGDFVKATCEFCGTENLTKEGATTCGYLTQNAVVKIYCPACHNSEVGPEHSLAEYHNESGLKTILRKGGRTIAFGGCVFSYVGCHNKCAYWVPRASANIGCNHTGVVGEGSEGLNDNLLEILQKEKVNINIVGDFKLNEEIAIILASFSASTSAFVETVKGLDYKAFKQIVESCGNFKVTKGKAKKGAWNIGEQKSILSPLYAFASEAARVVRSIFSRTLETAQNSVRVLQKAAITILDGISQYSLRLIDAMMFTSDLATNNLVVMAYITGGVVQLTSQWLTNIFGTVYEKLKPVLDWLEEKFKEGVEFLRDGWEIVKFISTCACEIVGGQIVTCAKEIKESVQTFFKLVNKFLALCADSIIIGGAKLKALNLGETFVTHSKGLYRKCVKSREETGLLMPLKAPKEIIFLEGETLPTEVLTEEVVLKTGDLQPLEQPTSEAVEAPLVGTPVCINGLMLLEIKDTEKYCALAPNMMVTNNTFTLKGGAPTKVTFGDDTVIEVQGYKSVNITFELDERIDKVLNEKCSAYTVELGTEVNEFACVVADAVIKTLQPVSELLTPLGIDLDEWSMATYYLFDESGEFKLASHMYCSFYPPDEDEEEGDCEEEEFEPSTQYEYGTEDDYQGKPLEFGATSAALQPEEEQEEDWLDDDSQQTVGQQDGSEDNQTTTIQTIVEVQPQLEMELTPVVQTIEVNSFSGYLKLTDNVYIKNADIVEEAKKVKPTVVVNAANVYLKHGGGVAGALNKATNNAMQVESDDYIATNGPLKVGGSCVLSGHNLAKHCLHVVGPNVNKGEDIQLLKSAYENFNQHEVLLAPLLSAGIFGADPIHSLRVCVDTVRTNVYLAVFDKNLYDKLVSSFLEMKSEKQVEQKIAEIPKEEVKPFITESKPSVEQRKQDDKKIKACVEEVTTTLEETKFLTENLLLYIDINGNLHPDSATLVSDIDITFLKKDAPYIVGDVVQEGVLTAVVIPTKKAGGTTEMLAKALRKVPTDNYITTYPGQGLNGYTVEEAKTVLKKCKSAFYILPSIISNEKQEILGTVSWNLREMLAHAEETRKLMPVCVETKAIVSTIQRKYKGIKIQEGVVDYGARFYFYTSKTTVASLINTLNDLNETLVTMPLGYVTHGLNLEEAARYMRSLKVPATVSVSSPDAVTAYNGYLTSSSKTPEEHFIETISLAGSYKDWSYSGQSTQLGIEFLKRGDKSVYYTSNPTTFHLDGEVITFDNLKTLLSLREVRTIKVFTTVDNINLHTQVVDMSMTYGQQFGPTYLDGADVTKIKPHNSHEGKTFYVLPNDDTLRVEAFEYYHTTDPSFLGRYMSALNHTKKWKYPQVNGLTSIKWADNNCYLATALLTLQQIELKFNPPALQDAYYRARAGEAANFCALILAYCNKTVGELGDVRETMSYLFQHANLDSCKRVLNVVCKTCGQQQTTLKGVEAVMYMGTLSYEQFKKGVQIPCTCGKQATKYLVQQESPFVMMSAPPAQYELKHGTFTCASEYAGNYQCGHYKHITSKETLYCIDGALLTKSSEYKGPITDVFYKENSYTTTIKPVTYKLDGVVCTEIDPKLDNYYKKDNSYFTEQPIDLVPNQPYPNASFDNFKFVCDNIKFADDLNQLTGYKKPASRELKVTFFPDLNGDVVAIDYKHYTPSFKKGAKLLHKPIVWHVNNATNKATYKPNTWCIRCLWSTKPVETSNSFDVLKSEDAQGMDNLACEDLKPVSEEVVENPTIQKDVLECNVKTTEVVGDIILKPANNSLKITEEVGHTDLMAAYVDNSSLTIKKPNELSRVLGLKTLATHGLAAVNSVPWDTIANYAKPFLNKVVSTTTNIVTRCLNRVCTNYMPYFFTLLLQLCTFTRSTNSRIKASMPTTIAKNTVKSVGKFCLEASFNYLKSPNFSKLINIIIWFLLLSVCLGSLIYSTAALGVLMSNLGMPSYCTGYREGYLNSTNVTIATYCTGSIPCSVCLSGLDSLDTYPSLETIQITISSFKWDLTAFGLVAEWFLAYILFTRFFYVLGLAAIMQLFFSYFAVHFISNSWLMWLIINLVQMAPISAMVRMYIFFASFYYVWKSYVHVVDGCNSSTCMMCYKRNRATRVECTTIVNGVRRSFYVYANGGKGFCKLHNWNCVNCDTFCAGSTFISDEVARDLSLQFKRPINPTDQSSYIVDSVTVKNGSIHLYFDKAGQKTYERHSLSHFVNLDNLRANNTKGSLPINVIVFDGKSKCEESSAKSASVYYSQLMCQPILLLDQALVSDVGDSAEVAVKMFDAYVNTFSSTFNVPMEKLKTLVATAEAELAKNVSLDNVLSTFISAARQGFVDSDVETKDVVECLKLSHQSDIEVTGDSCNNYMLTYNKVENMTPRDLGACIDCSARHINAQVAKSHNIALIWNVKDFMSLSEQLRKQIRSAAKKNNLPFKLTCATTRQVVNVVTTKIALKGGKIVNNWLKQLIKVTLVFLFVAAIFYLITPVHVMSKHTDFSSEIIGYKAIDGGVTRDIASTDTCFANKHADFDTWFSQRGGSYTNDKACPLIAAVITREVGFVVPGLPGTILRTTNGDFLHFLPRVFSAVGNICYTPSKLIEYTDFATSACVLAAECTIFKDASGKPVPYCYDTNVLEGSVAYESLRPDTRYVLMDGSIIQFPNTYLEGSVRVVTTFDSEYCRHGTCERSEAGVCVSTSGRWVLNNDYYRSLPGVFCGVDAVNLLTNMFTPLIQPIGALDISASIVAGGIVAIVVTCLAYYFMRFRRAFGEYSHVVAFNTLLFLMSFTVLCLTPVYSFLPGVYSVIYLYLTFYLTNDVSFLAHIQWMVMFTPLVPFWITIAYIICISTKHFYWFFSNYLKRRVVFNGVSFSTFEEAALCTFLLNKEMYLKLRSDVLLPLTQYNRYLALYNKYKYFSGAMDTTSYREAACCHLAKALNDFSNSGSDVLYQPPQTSITSAVLQSGFRKMAFPSGKVEGCMVQVTCGTTTLNGLWLDDVVYCPRHVICTSEDMLNPNYEDLLIRKSNHNFLVQAGNVQLRVIGHSMQNCVLKLKVDTANPKTPKYKFVRIQPGQTFSVLACYNGSPSGVYQCAMRPNFTIKGSFLNGSCGSVGFNIDYDCVSFCYMHHMELPTGVHAGTDLEGNFYGPFVDRQTAQAAGTDTTITVNVLAWLYAAVINGDRWFLNRFTTTLNDFNLVAMKYNYEPLTQDHVDILGPLSAQTGIAVLDMCASLKELLQNGMNGRTILGSALLEDEFTPFDVVRQCSGVTFQSAVKRTIKGTHHWLLLTILTSLLVLVQSTQWSLFFFLYENAFLPFAMGIIAMSAFAMMFVKHKHAFLCLFLLPSLATVAYFNMVYMPASWVMRIMTWLDMVDTSLSGFKLKDCVMYASAVVLLILMTARTVYDDGARRVWTLMNVLTLVYKVYYGNALDQAISMWALIISVTSNYSGVVTTVMFLARGIVFMCVEYCPIFFITGNTLQCIMLVYCFLGYFCTCYFGLFCLLNRYFRLTLGVYDYLVSTQEFRYMNSQGLLPPKNSIDAFKLNIKLLGVGGKPCIKVATVQSKMSDVKCTSVVLLSVLQQLRVESSSKLWAQCVQLHNDILLAKDTTEAFEKMVSLLSVLLSMQGAVDINKLCEEMLDNRATLQAIASEFSSLPSYAAFATAQEAYEQAVANGDSEVVLKKLKKSLNVAKSEFDRDAAMQRKLEKMADQAMTQMYKQARSEDKRAKVTSAMQTMLFTMLRKLDNDALNNIINNARDGCVPLNIIPLTTAAKLMVVIPDYNTYKNTCDGTTFTYASALWEIQQVVDADSKIVQLSEISMDNSPNLAWPLIVTALRANSAVKLQNNELSPVALRQMSCAAGTTQTACTDDNALAYYNTTKGGRFVLALLSDLQDLKWARFPKSDGTGTIYTELEPPCRFVTDTPKGPKVKYLYFIKGLNNLNRGMVLGSLAATVRLQAGNATEVPANSTVLSFCAFAVDAAKAYKDYLASGGQPITNCVKMLCTHTGTGQAITVTPEANMDQESFGGASCCLYCRCHIDHPNPKGFCDLKGKYVQIPTTCVNDPVGFTLKNTVCTVCGMWKGYGCSCDQLREPMLQSADAQSFLNGFAV

SEQ ID NO: 438 - protein, 1271 aa, Severe acute respiratory syndrome coronavirus 2
MFVFLVLLPLVSSQCVNLTTRTQLPPAYTNSFTRGVYYPDKVFRSSVLHSTQDLFLPFFSNVTWFHAISGTNGTKRFDNPVLPFNDGVYFASTEKSNIIRGWIFGTTLDSKTQSLLIVNNATNVVIKVCEFQFCNDPFLGVYYHKNNKSWMESEFRVYSSANNCTFEYVSQPFLMDLEGKQGNFKNLREFVFKNIDGYFKIYSKHTPINLVRDLPQGFSALEPLVDLPIGINITRFQTLLALHRSYLTPGDSSSGWTAGAAAYYVGYLQPRTFLLKYNENGTITDAVDCALDPLSETKCTLKSFTVEKGIYQTSNFRVQPTESIVRFPNITNLCPFGEVFNATRFASVYAWNRKRISNCVADYSVLYNSASFSTFKCYGVSPTKLNDLCFTNVYADSFVIRGDEVRQIAPGQTGKIADYNYKLPDDFTGCVIAWNSNNLDSKVGGNYNYLYRLFRKSNLKPFERDISTEIYQAGSTPCNGVEGFNCYFPLQSYGFQPTNGVGYQPYRVVVLSFELLHAPATVCGPKKSTNLVKNKCVNFNFNGLTGTGVLTESNKKFLPFQQFGRDIADTTDAVRDPQTLEILDITPCSFGGVSVITPGTNTSNQVAVLYQGVNCTEVPVAIHADQLTPTWRVYSTGSNVFQTRAGCLIGAEHVNNSYECDIPIGAGICASYQTQTNSPRRARSVASQSIIAYTMSLGAENSVAYSNNSIAIPTNFTISVTTEILPVSMTKTSVDCTMYICGDSTECSNLLLQYGSFCTQLNRALTGIAVEQDKNTQEVFAQVKQIYKTPPIKDFGGFNFSQILPDPSKPSKRSFIEDLLFNKVTLADAGFIKQYGDCLGDIAARDLICAQKFNGLTVLPPLLTDEMIAQYTSALLAGTITSGWTFGAGAALQIPFAMQMAYRFNGIGVTQNVLYENQKLIANQFNSAIGKIQDSLSSTASALGKLQDVVNQNAQALNTLVKQLSSNFGAISSVLNDILSRLDKVEAEVQIDRLITGRLQSLQTYVTQQLIRAAEIRASANLAATKMSECVLGQSKRVDFCGKGYHLMSFPQSAPHGVVFLHVTYVPAQEKNFTTAPAICHDGKAHFPREGVFVSNGTHWFVTQRNFYEPQIITTDNTFVSGNCDVVIGIVNNTVYDPLQPELDSFKEELDKYFKNHTSPDVDLGDISGINASVVNIQKEIDRLNEVAKNLNESLIDLQELGKYEQYIKWPWYIWLGFIAGLIAIVMVTIMLCCMTSCCSCLKGCCSCGSCCKFDEDDSEPVLKGVKLHYT

SEQ ID NO: 439 - protein, 275 aa, Severe acute respiratory syndrome coronavirus 2
MDLFMRIFTIGTVTLKQGEIKDATPSDFVRATATIPIQASLPFGWLIVGVALLAVFHSASKIITLKKRWQLALSKGVHFVCNLLLLFVTVYSHLLLVAAGLEAPFLYLYALVYFLQSINFVRIIMRLWLCWKCRSKNPLLYDANYFLCWHINCYDYCIPYNSVTSSIVITSGDGTTSPISEHDYQIGGYTEKWESGVKDCVVLHSYFTSDYYQLYSTQLSTDTGVEHVTFFIYNKIVDEPEEHVQIHTIDGSSGVVNPVMEPIYDEPTTTTSVPL

SEQ ID NO: 440 - protein, 75 aa, Severe acute respiratory syndrome coronavirus 2; identical to SEQ ID NO: 405

SEQ ID NO: 441 - protein, 222 aa, Severe acute respiratory syndrome coronavirus 2
MADSNGTITVEELKKLLEQWNLVIGFLFLTWICLLQFAYANRNRFLYVIKLIFLWLLWPVTLACFVLAAVYRINWITGGIAIAMACLVGLMWLSYFIASFRLFARTRSMWSFNPETNILLNVPLHGTILTRPLLESELVIGAVILRGHLRIAGHHLGRCDIKDLPKEITVATSRTLSYYKLGASQRVAGDSGFAAYSRYRIGNYKLNTDHSSSSDNIALLVQ

SEQ ID NO: 442 - protein, 61 aa, Severe acute respiratory syndrome coronavirus 2; identical to SEQ ID NO: 407

SEQ ID NO: 443 - protein, 121 aa, Severe acute respiratory syndrome coronavirus 2; identical to SEQ ID NO: 408

SEQ ID NO: 444 - protein, 43 aa, Severe acute respiratory syndrome coronavirus 2; identical to SEQ ID NO: 409

SEQ ID NO: 445 - protein, 121 aa, Severe acute respiratory syndrome coronavirus 2; identical to SEQ ID NO: 422

SEQ ID NO: 446 - protein, 419 aa, Severe acute respiratory syndrome coronavirus 2
MSDNGPQNQRNAPRITFGGPSDSTGSNQNGERSGARSKQRRPQGLPNNTASWFTALTQHGKEDLKFPRGQGVPINTNSSPDDQIGYYRRATRRIRGGDGKMKDLSPRWYFYYLGTGPEAGLPYGANKDGIIWVATEGAFNTPKDHIGTRNPANNAAIVLQLPQGTTLPKGFYAEGSRGGSQASSRSSSRSRNSSRNSTPGSSRGISPARMAGNGGDAALALLLLDRLNQLESKMSGKGQQQQGQTVTKKSAAEASKKPRQKRTATKAYNVTQAFGRRGPEQTQGNFGDQELIRQGTDYKHWPQIAQFAPSASAFFGMSRIGMEVTPSGTWLTYTGAIKLDDKDPNFKDQVILLNKHIDAYKTFPPTEPKKDKKKKADETQALPQRQKKQQTVTLLPAADLDDFSKQLQQSMSSADSTQA

SEQ ID NO: 447 - protein, 38 aa, Severe acute respiratory syndrome coronavirus 2; identical to SEQ ID NO: 412

SEQ ID NO: 448-500 - skipped (53 entries)

SEQ ID NO: 501 - DNA, 21291 bp, Severe acute respiratory syndrome coronavirus 2
  source 1..21291: mol_type = unassigned DNA
atggagagccttgtccctggtttcaacgagaaaacacacgtccaactcagtttgcctgttttacaggttcgcgacgtgctcgtacgtggctttggagactccgtggaggaggtcttatcagaggcacgtcaacatcttaaagatggcacttgtggcttagtagaagttgaaaaaggcgttttgcctcaacttgaacagccctatgtgttcatcaaacgttcggatgctcgaactgcacctcatggtcatgttatggttgagctggtagcagaactcgaaggcattcagtacggtcgtagtggtgagacacttggtgtccttgtccctcatgtgggcgaaataccagtggcttaccgcaaggttcttcttcgtaagaacggtaataaaggagctggtggccatagttacggcgccgatctaaagtcatttgacttaggcgacgagcttggcactgatccttatgaagattttcaagaaaactggaacactaaacatagcagtggtgttacccgtgaactcatgcgtgagcttaacggaggggcatacactcgctatgtcgataacaacttctgtggccctgatggctaccctcttgagtgcattaaagaccttctagcacgtgctggtaaagcttcatgcactttgtccgaacaactggactttattgacactaagaggggtgtatactgctgccgtgaacatgagcatgaaattgcttggtacacggaacgttctgaaaagagctatgaattgcagacaccttttgaaattaaattggcaaagaaatttgacaccttcaatggggaatgtccaaattttgtatttcccttaaattccataatcaagactattcaaccaagggttgaaaagaaaaagcttgatggctttatgggtagaattcgatctgtctatccagttgcgtcaccaaatgaatgcaaccaaatgtgcctttcaactctcatgaagtgtgatcattgtggtgaaacttcatggcagacgggcgattttgttaaagccacttgcgaattttgtggcactgagaatttgactaaagaaggtgccactacttgtggttacttaccccaaaatgctgttgttaaaatttattgtccagcatgtcacaattcagaagtaggacctgagcatagtcttgccgaataccataatgaatctggcttgaaaaccattcttcgtaagggtggtcgcactattgcctttggaggctgtgtgttctcttatgttggttgccataacaagtgtgcctattgggttccacgtgctagcgctaacataggttgtaaccatacaggtgttgttggagaaggttccgaaggtcttaatgacaaccttcttgaaatactccaaaaagagaaagtcaacatcaatattgttggtgactttaaacttaatgaagagatcgccattattttggcatctttttctgcttccacaagtgcttttgtggaaactgtgaaaggtttggattataaagcattcaaacaaattgttgaatcctgtggtaattttaaagttacaaaaggaaaagctaaaaaaggtgcctggaatattggtgaacagaaatcaatactgagtcctctttatgcatttgcatcagaggctgctcgtgttgtacgatcaattttctcccgcactcttgaaactgctcaaaattctgtgcgtgttttacagaaggccgctataacaatactagatggaatttcacagtattcactgagactcattgatgctatgatgttcacatctgatttggctactaacaatctagttgtaatggcctacattacaggtggtgttgttcagttgacttcgcagtggctaactaacatctttggcactgtttatgaaaaactcaaacccgtccttgattggcttgaagagaagtttaaggaaggtgtagagtttcttagagacggttgggaaattgttaaatttatctcaacctgtgcttgtgaaattgtcggtggacaaattgtcacctgtgcaaaggaaattaaggagagtgttcagacattctttaagcttgtaaataaatttttggctttgtgtgctgactctatcattattggtggagctaaacttaaagccttgaatttaggtgaaacatttgtcacgcactcaaagggattgtacagaaagtgtgttaaatccagagaagaaactggcctactcatgcctctaaaagccccaaaagaaattatcttcttagagggagaaacacttcccacagaagtgttaacagaggaagttgtcttgaaaactggtgatttacaaccattagaacaacctactagtgaagctgttgaagctccattggttggtacaccagtttgtattaacgggcttatgttgctcgaaatcaaagacacagaaaagtactgtgcccttgcacctaatatgatggtaacaaacaataccttcacactcaaaggcggtgcaccaacaaaggttacttttggtgatgacactgtgatagaagtgcaaggttacaagagtgtgaatatcacttttgaacttgatgaaaggattgataaagtacttaatgagaagtgctctgcctatacagttgaactcggtacagaagtaaatgagttcgcctgtgttgtggcagatgctgtcataaaaactttgcaaccagtatctgaattacttacaccactgggcattgatttagatgagtggagtatggctacatactacttatttgatgagtctggtgagtttaaattggcttcacatatgtattgttctttctaccctccagatgaggatgaagaagaaggtgattgtgaagaagaagagtttgagccatcaactcaatatgagtatggtactgaagatgattaccaaggtaaacctttggaatttggtgccacttctgctgctcttcaacctgaagaagagcaagaagaagattggttagatgatgatagtcaacaaactgttggtcaacaagacggcagtgaggacaatcagacaactactattcaaacaattgttgaggttcaacctcaattagagatggaacttacaccagttgttcagactattgaagtgaatagttttagtggttatttaaaacttactgacaatgtatacattaaaaatgcagacattgtggaagaagctaaaaaggtaaaaccaacagtggttgttaatgcagccaatgtttaccttaaacatggaggaggtgttgcaggagccttaaataaggctactaacaatgccatgcaagttgaatctgatgattacatagctactaatggaccacttaaagtgggtggtagttgtgttttaagcggacacaatcttgctaaacactgtcttcatgttgtcggcccaaatgttaacaaaggtgaagacattcaacttcttaagagtgcttatgaaaattttaatcagcacgaagttctacttgcaccattattatcagctggtatttttggtgctgaccctatacattctttaagagtttgtgtagatactgttcgcacaaatgtctacttagctgtctttgataaaaatctctatgacaaacttgtttcaagctttttggaaatgaagagtgaaaagcaagttgaacaaaagatcgctgagattcctaaagaggaagttaagccatttataactgaaagtaaaccttcagttgaacagagaaaacaagatgataagaaaatcaaagcttgtgttgaagaagttacaacaactctggaagaaactaagttcctcacagaaaacttgttactttatattgacattaatggcaatcttcatccagattctgccactcttgttagtgacattgacatcactttcttaaagaaagatgctccatatatagtgggtgatgttgttcaagagggtgttttaactgctgtggttatacctactaaaaaggctggtggcactactgaaatgctagcgaaagctttgagaaaagtgccaacagacaattatataaccacttacccgggtcagggtttaaatggttacactgtagaggaggcaaagacagtgcttaaaaagtgtaaaagtgccttttacattctaccatctattatctctaatgagaagcaagaaattcttggaactgtttcttggaatttgcgagaaatgcttgcacatgcagaagaaacacgcaaattaatgcctgtctgtgtggaaactaaagccatagtttcaactatacagcgtaaatataagggtattaaaatacaagagggtgtggttgattatggtgctagattttacttttacaccagtaaaacaactgtagcgtcacttatcaacacacttaacgatctaaatgaaactcttgttacaatgccacttggctatgtaacacatggcttaaatttggaagaagctgctcggtatatgagatctctcaaagtgccagctacagtttctgtttcttcacctgatgctgttacagcgtataatggttatcttacttcttcttctaaaacacctgaagaacattttattgaaaccatctcacttgctggttcctataaagattggtcctattctggacaatctacacaactaggtatagaatttcttaagagaggtgataaaagtgtatattacactagtaatcctaccacattccacctagatggtgaagttatcacctttgacaatcttaagacacttctttctttgagagaagtgaggactattaaggtgtttacaacagtagacaacattaacctccacacgcaagttgtggacatgtcaatgacatatggacaacagtttggtccaacttatttggatggagctgatgttactaaaataaaacctcataattcacatgaaggtaaaacattttatgttttacctaatgatgacactctacgtgttgaggcttttgagtactaccacacaactgatcctagttttctgggtaggtacatgtcagcattaaatcacactaaaaagtggaaatacccacaagttaatggtttaacttctattaaatgggcagataacaactgttatcttgccactgcattgttaacactccaacaaatagagttgaagtttaatccacctgctctacaagatgcttattacagagcaagggctggtgaagctgctaacttttgtgcacttatcttagcctactgtaataagacagtaggtgagttaggtgatgttagagaaacaatgagttacttgtttcaacatgccaatttagattcttgcaaaagagtcttgaacgtggtgtgtaaaacttgtggacaacagcagacaacccttaagggtgtagaagctgttatgtacatgggcacactttcttatgaacaatttaagaaaggtgttcagataccttgtacgtgtggtaaacaagctacaaaatatctagtacaacaggagtcaccttttgttatgatgtcagcaccacctgctcagtatgaacttaagcatggtacatttacttgtgctagtgagtacactggtaattaccagtgtggtcactataaacatataacttctaaagaaactttgtattgcatagacggtgctttacttacaaagtcctcagaatacaaaggtcctattacggatgttttctacaaagaaaacagttacacaacaaccataaaaccagttacttataaattggatggtgttgtttgtacagaaattgaccctaagttggacaattattataagaaagacaattcttatttcacagagcaaccaattgatcttgtaccaaaccaaccatatccaaacgcaagcttcgataattttaagtttgtatgtgataatatcaaatttgctgatgatttaaaccagttaactggttataagaaacctgcttcaagagagcttaaagttacatttttccctgacttaaatggtgatgtggtggctattgattataaacactacacaccctcttttaagaaaggagctaaattgttacataaacctattgtttggcatgttaacaatgcaactaataaagccacgtataaaccaaatacctggtgtatacgttgtctttggagcacaaaaccagttgaaacatcaaattcgtttgatgtactgaagtcagaggacgcgcagggaatggataatcttgcctgcgaagatctaaaaccagtctctgaagaagtagtggaaaatcctaccatacagaaagacgttcttgagtgtaatgtgaaaactaccgaagttgtaggagacattatacttaaaccagcaaataatagtttaaaaattacagaagaggttggccacacagatctaatggctgcttatgtagacaattctagtcttactattaagaaacctaatgaattatctagagtattaggtttgaaaacccttgctactcatggtttagctgctgttaatagtgtcccttgggatactatagctaattatgctaagccttttcttaacaaagttgttagtacaactactaacatagttacacggtgtttaaaccgtgtttgtactaattatatgccttatttctttactttattgctacaattgtgtacttttactagaagtacaaattctagaattaaagcatctatgccgactactatagcaaagaatactgttaagagtgtcggtaaattttgtctagaggcttcatttaattatttgaagtcacctaatttttctaaactgataaatattataatttggtttttactattaagtgtttgcctaggttctttaatctactcaaccgctgctttaggtgttttaatgtctaatttaggcatgccttcttactgtactggttacagagaaggctatttgaactctactaatgtcactattgcaacctactgtactggttctataccttgtagtgtttgtcttagtggtttagattctttagacacctatccttctttagaaactatacaaattaccatttcatcttttaaatgggatttaactgcttttggcttagttgcagagtggtttttggcatatattcttttcactaggtttttctatgtacttggattggctgcaatcatgcaattgtttttcagctattttgcagtacattttattagtaattcttggcttatgtggttaataattaatcttgtacaaatggccccgatttcagctatggttagaatgtacatcttctttgcatcattttattatgtatggaaaagttatgtgcatgttgtagacggttgtaattcatcaacttgtatgatgtgttacaaacgtaatagagcaacaagagtcgaatgtacaactattgttaatggtgttagaaggtccttttatgtctatgctaatggaggtaaaggcttttgcaaactacacaattggaattgtgttaattgtgatacattctgtgctggtagtacatttattagtgatgaagttgcgagagacttgtcactacagtttaaaagaccaataaatcctactgaccagtcttcttacatcgttgatagtgttacagtgaagaatggttccatccatctttactttgataaagctggtcaaaagacttatgaaagacattctctctctcattttgttaacttagacaacctgagagctaataacactaaaggttcattgcctattaatgttatagtttttgatggtaaatcaaaatgtgaagaatcatctgcaaaatcagcgtctgtttactacagtcagcttatgtgtcaacctatactgttactagatcaggcattagtgtctgatgttggtgatagtgcggaagttgcagttaaaatgtttgatgcttacgttaatacgttttcatcaacttttaacgtaccaatggaaaaactcaaaacactagttgcaactgcagaagctgaacttgcaaagaatgtgtccttagacaatgtcttatctacttttatttcagcagctcggcaagggtttgttgattcagatgtagaaactaaagatgttgttgaatgtcttaaattgtcacatcaatctgacatagaagttactggcgatagttgtaataactatatgctcacctataacaaagttgaaaacatgacaccccgtgaccttggtgcttgtattgactgtagtgcgcgtcatattaatgcgcaggtagcaaaaagtcacaacattgctttgatatggaacgttaaagatttcatgtcattgtctgaacaactacgaaaacaaatacgtagtgctgctaaaaagaataacttaccttttaagttgacatgtgcaactactagacaagttgttaatgttgtaacaacaaagatagcacttaagggtggtaaaattgttaataattggttgaagcagttaattaaagttacacttgtgttcctttttgttgctgctattttctatttaataacacctgttcatgtcatgtctaaacatactgacttttcaagtgaaatcataggatacaaggctattgatggtggtgtcactcgtgacatagcatctacagatacttgttttgctaacaaacatgctgattttgacacatggtttagccagcgtggtggtagttatactaatgacaaagcttgcccattgattgctgcagtcataacaagagaagtgggttttgtcgtgcctggtttgcctggcacgatattacgcacaactaatggtgactttttgcatttcttacctagagtttttagtgcagttggtaacatctgttacacaccatcaaaacttatagagtacactgactttgcaacatcagcttgtgttttggctgctgaatgtacaatttttaaagatgcttctggtaagccagtaccatattgttatgataccaatgtactagaaggttctgttgcttatgaaagtttacgccctgacacacgttatgtgctcatggatggctctattattcaatttcctaacacctaccttgaaggttctgttagagtggtaacaacttttgattctgagtactgtaggcacggcacttgtgaaagatcagaagctggtgtttgtgtatctactagtggtagatgggtacttaacaatgattattacagatctttaccaggagttttctgtggtgtagatgctgtaaatttacttactaatatgtttacaccactaattcaacctattggtgctttggacatatcagcatctatagtagctggtggtattgtagctatcgtagtaacatgccttgcctactattttatgaggtttagaagagcttttggtgaatacagtcatgtagttgcctttaatactttactattccttatgtcattcactgtactctgtttaacaccagtttactcattcttacctggtgtttattctgttatttacttgtacttgacattttatcttactaatgatgtttcttttttagcacatattcagtggatggttatgttcacacctttagtacctttctggataacaattgcttatatcatttgtatttccacaaagcatttctattggttctttagtaattacctaaagagacgtgtagtctttaatggtgtttcctttagtacttttgaagaagctgcgctgtgcacctttttgttaaataaagaaatgtatctaaagttgcgtagtgatgtgctattacctcttacgcaatataatagatacttagctctttataataagtacaagtattttagtggagcaatggatacaactagctacagagaagctgcttgttgtcatctcgcaaaggctctcaatgacttcagtaactcaggttctgatgttctttaccaaccaccacaaacctctatcacctcagctgttttgcagagtggttttagaaaaatggcattcccatctggtaaagttgagggttgtatggtacaagtaacttgtggtacaactacacttaacggtctttggcttgatgacgtagtttactgtccaagacatgtgatctgcacctctgaagacatgcttaaccctaattatgaagatttactcattcgtaagtctaatcataatttcttggtacaggctggtaatgttcaactcagggttattggacattctatgcaaaattgtgtacttaagcttaaggttgatacagccaatcctaagacacctaagtataagtttgttcgcattcaaccaggacagactttttcagtgttagcttgttacaatggttcaccatctggtgtttaccaatgtgctatgaggcccaatttcactattaagggttcattccttaatggttcatgtggtagtgttggttttaacatagattatgactgtgtctctttttgttacatgcaccatatggaattaccaactggagttcatgctggcacagacttagaaggtaacttttatggaccttttgttgacaggcaaacagcacaagcagctggtacggacacaactattacagttaatgttttagcttggttgtacgctgctgttataaatggagacaggtggtttctcaatcgatttaccacaactcttaatgactttaaccttgtggctatgaagtacaattatgaacctctaacacaagaccatgttgacatactaggacctctttctgctcaaactggaattgccgttttagatatgtgtgcttcattaaaagaattactgcaaaatggtatgaatggacgtaccatattgggtagtgctttattagaagatgaatttacaccttttgatgttgttagacaatgctcaggtgttactttccaaagtgcagtgaaaagaacaatcaagggtacacaccactggttgttactcacaattttgacttcacttttagttttagtccagagtactcaatggtctttgttcttttttttgtatgaaaatgcctttttaccttttgctatgggtattattgctatgtctgcttttgcaatgatgtttgtcaaacataagcatgcatttctctgtttgtttttgttaccttctcttgccactgtagcttattttaatatggtctatatgcctgctagttgggtgatgcgtattatgacatggttggatatggttgatactagtttgtctggttttaagctaaaagactgtgttatgtatgcatcagctgtagtgttactaatccttatgacagcaagaactgtgtatgatgatggtgctaggagagtgtggacacttatgaatgtcttgacactcgtttataaagtttattatggtaatgctttagatcaagccatttccatgtgggctcttataatctctgttacttctaactactcaggtgtagttacaactgtcatgtttttggccagaggtattgtttttatgtgtgttgagtattgccctattttcttcataactggtaatacacttcagtgtataatgctagtttattgtttcttaggctatttttgtacttgttactttggcctcttttgtttactcaaccgctactttagactgactcttggtgtttatgattacttagtttctacacaggagtttagatatatgaattcacagggactactcccacccaagaatagcatagatgccttcaaactcaacattaaattgttgggtgttggtggcaaaccttgtatcaaagtagccactgtacagtctaaaatgtcagatgtaaagtgcacatcagtagtcttactctcagttttgcaacaactcagagtagaatcatcatctaaattgtgggctcaatgtgtccagttacacaatgacattctcttagctaaagatactactgaagcctttgaaaaaatggtttcactactttctgttttgctttccatgcagggtgctgtagacataaacaagctttgtgaagaaatgctggacaacagggcaaccttacaagctatagcctcagagtttagttcccttccatcatatgcagcttttgctactgctcaagaagcttatgagcaggctgttgctaatggtgattctgaagttgttcttaaaaagttgaagaagtctttgaatgtggctaaatctgaatttgaccgtgatgcagccatgcaacgtaagttggaaaagatggctgatcaagctatgacccaaatgtataaacaggctagatctgaggacaagagggcaaaagttactagtgctatgcagacaatgcttttcactatgcttagaaagttggataatgatgcactcaacaacattatcaacaatgcaagagatggttgtgttcccttgaacataatacctcttacaacagcagccaaactaatggttgtcataccagactataacacatataaaaatacgtgtgatggtacaacatttacttatgcatcagcattgtgggaaatccaacaggttgtagatgcagatagtaaaattgttcaacttagtgaaattagtatggacaattcacctaatttagcatggcctcttattgtaacagctttaagggccaattctgctgtcaaattacagaataatgagcttagtcctgttgcactacgacagatgtcttgtgctgccggtactacacaaactgcttgcactgatgacaatgcgttagcttactacaacacaacaaagggaggtaggtttgtacttgcactgttatccgatttacaggatttgaaatgggctagattccctaagagtgatggaactggtactatctatacagaactggaaccaccttgtaggtttgttacagacacacctaaaggtcctaaagtgaagtatttatactttattaaaggattaaacaacctaaatagaggtatggtacttggtagtttagctgccacagtacgtctacaagctggtaatgcaacagaagtgcctgccaattcaactgtattatctttctgtgcttttgctgtagatgctgctaaagcttacaaagattatctagctagtgggggacaaccaatcactaattgtgttaagatgttgtgtacacacactggtactggtcaggcaataacagttacaccggaagccaatatggatcaagaatcctttggtggtgcatcgtgttgtctgtactgccgttgccacatagatcatccaaatcctaaaggattttgtgacttaaaaggtaagtatgtacaaatacctacaacttgtgctaatgaccctgtgggttttacacttaaaaacacagtctgtaccgtctgcggtatgtggaaaggttatggctgtagttgtgatcaactccgcgaacccatgcttcagtcagctgatgcacaatcgtttttaaaccgggtttgcggtgtaagtgcagcccgtcttacaccgtgcggcacaggcactagtactgatgtcgtatacagggcttttgacatctacaatgataaagtagctggttttgctaaattcctaaaaactaattgttgtcgcttccaagaaaaggacgaagatgacaatttaattgattcttactttgtagttaagagacacactttctctaactaccaacatgaagaaacaatttataatttacttaaggattgtccagctgttgctaaacatgacttctttaagtttagaatagacggtgacatggtaccacatatatcacgtcaacgtcttactaaatacacaatggcagacctcgtctatgctttaaggcattttgatgaaggtaattgtgacacattaaaagaaatacttgtcacatacaattgttgtgatgatgattatttcaataaaaaggactggtatgattttgtagaaaacccagatatattacgcgtatacgccaacttaggtgaacgtgtacgccaagctttgttaaaaacagtacaattctgtgatgccatgcgaaatgctggtattgttggtgtactgacattagataatcaagatctcaatggtaactggtatgatttcggtgatttcatacaaaccacgccaggtagtggagttcctgttgtagattcttattattcattgttaatgcctatattaaccttgaccagggctttaactgcagagtcacatgttgacactgacttaacaaagccttacattaagtgggatttgttaaaatatgacttcacggaagagaggttaaaactctttgaccgttattttaaatattgggatcagacataccacccaaattgtgttaactgtttggatgacagatgcattctgcattgtgcaaactttaatgttttattctctacagtgttcccacctacaagttttggaccactagtgagaaaaatatttgttgatggtgttccatttgtagtttcaactggataccacttcagagagctaggtgttgtacataatcaggatgtaaacttacatagctctagacttagttttaaggaattacttgtgtatgctgctgaccctgctatgcacgctgcttctggtaatctattactagataaacgcactacgtgcttttcagtagctgcacttactaacaatgttgcttttcaaactgtcaaacccggtaattttaacaaagacttctatgactttgctgtgtctaagggtttctttaaggaaggaagttctgttgaattaaaacacttcttctttgctcaggatggtaatgctgctatcagcgattatgactactatcgttataatctaccaacaatgtgtgatatcagacaactactatttgtagttgaagttgttgataagtactttgattgttacgatggtggctgtattaatgctaaccaagtcatcgtcaacaacctagacaaatcagctggttttccatttaataaatggggtaaggctagactttattatgattcaatgagttatgaggatcaagatgcacttttcgcatatacaaaacgtaatgtcatccctactataactcaaatgaatcttaagtatgccattagtgcaaagaatagagctcgcaccgtagctggtgtctctatctgtagtactatgaccaatagacagtttcatcaaaaattattgaaatcaatagccgccactagaggagctactgtagtaattggaacaagcaaattctatggtggttggcacaacatgttaaaaactgtttatagtgatgtagaaaaccctcaccttatgggttgggattatcctaaatgtgatagagccatgcctaacatgcttagaattatggcctcacttgttcttgctcgcaaacatacaacgtgttgtagcttgtcacaccgtttctatagattagctaatgagtgtgctcaagtattgagtgaaatggtcatgtgtggcggttcactatatgttaaaccaggtggaacctcatcaggagatgccacaactgcttatgctaatagtgtttttaacatttgtcaagctgtcacggccaatgttaatgcacttttatctactgatggtaacaaaattgccgataagtatgtccgcaatttacaacacagactttatgagtgtctctatagaaatagagatgttgacacagactttgtgaatgagttttacgcatatttgcgtaaacatttctcaatgatgatactctctgacgatgctgttgtgtgtttcaatagcacttatgcatctcaaggtctagtggctagcataaagaactttaagtcagttctttattatcaaaacaatgtttttatgtctgaagcaaaatgttggactgagactgaccttactaaaggacctcatgaattttgctctcaacatacaatgctagttaaacagggtgatgattatgtgtaccttccttacccagatccatcaagaatcctaggggccggctgttttgtagatgatatcgtaaaaacagatggtacacttatgattgaacggttcgtgtctttagctatagatgcttacccacttactaaacatcctaatcaggagtatgctgatgtctttcatttgtacttacaatacataagaaagctacatgatgagttaacaggacacatgttagacatgtattctgttatgcttactaatgataacacttcaaggtattgggaacctgagttttatgaggctatgtacacaccgcatacagtcttacaggctgttggggcttgtgttctttgcaattcacagacttcattaagatgtggtgcttgcatacgtagaccattcttatgttgtaaatgctgttacgaccatgtcatatcaacatcacataaattagtcttgtctgttaatccgtatgtttgcaatgctccaggttgtgatgtcacagatgtgactcaactttacttaggaggtatgagctattattgtaaatcacataaaccacccattagttttccattgtgtgctaatggacaagtttttggtttatataaaaatacatgtgttggtagcgataatgttactgactttaatgcaattgcaacatgtgactggacaaatgctggtgattacattttagctaacacctgtactgaaagactcaagctttttgcagcagaaacgctcaaagctactgaggagacatttaaactgtcttatggtattgctactgtacgtgaagtgctgtctgacagagaattacatctttcatgggaagttggtaaacctagaccaccacttaaccgaaattatgtctttactggttatcgtgtaactaaaaacagtaaagtacaaataggagagtacacctttgaaaaaggtgactatggtgatgctgttgtttaccgaggtacaacaacttacaaattaaatgttggtgattattttgtgctgacatcacatacagtaatgccattaagtgcacctacactagtgccacaagagcactatgttagaattactggcttatacccaacactcaatatctcagatgagttttctagcaatgttgcaaattatcaaaaggttggtatgcaaaagtattctacactccagggaccacctggtactggtaagagtcattttgctattggcctagctctctactacccttctgctcgcatagtgtatacagcttgctctcatgccgctgttgatgcactatgtgagaaggcattaaaatatttgcctatagataaatgtagtagaattatacctgcacgtgctcgtgtagagtgttttgataaattcaaagtgaattcaacattagaacagtatgtcttttgtactgtaaatgcattgcctgagacgacagcagatatagttgtctttgatgaaatttcaatggccacaaattatgatttgagtgttgtcaatgccagattacgtgctaagcactatgtgtacattggcgaccctgctcaattacctgcaccacgcacattgctaactaagggcacactagaaccagaatatttcaattcagtgtgtagacttatgaaaactataggtccagacatgttcctcggaacttgtcggcgttgtcctgctgaaattgttgacactgtgagtgctttggtttatgataataagcttaaagcacataaagacaaatcagctcaatgctttaaaatgttttataagggtgttatcacgcatgatgtttcatctgcaattaacaggccacaaataggcgtggtaagagaattccttacacgtaaccctgcttggagaaaagctgtctttatttcaccttataattcacagaatgctgtagcctcaaagattttgggactaccaactcaaactgttgattcatcacagggctcagaatatgactatgtcatattcactcaaaccactgaaacagctcactcttgtaatgtaaacagatttaatgttgctattaccagagcaaaagtaggcatactttgcataatgtctgatagagacctttatgacaagttgcaatttacaagtcttgaaattccacgtaggaatgtggcaactttacaagctgaaaatgtaacaggactctttaaagattgtagtaaggtaatcactgggttacatcctacacaggcacctacacacctcagtgttgacactaaattcaaaactgaaggtttatgtgttgacatacctggcatacctaaggacatgacctatagaagactcatctctatgatgggttttaaaatgaattatcaagttaatggttaccctaacatgtttatcacccgcgaagaagctataagacatgtacgtgcatggattggcttcgatgtcgaggggtgtcatgctactagagaagctgttggtaccaatttacctttacagctaggtttttctacaggtgttaacctagttgctgtacctacaggttatgttgatacacctaataatacagatttttccagagttagtgctaaaccaccgcctggagatcaatttaaacacctcataccacttatgtacaaaggacttccttggaatgtagtgcgtataaagattgtacaaatgttaagtgacacacttaaaaatctctctgacagagtcgtatttgtcttatgggcacatggctttgagttgacatctatgaagtattttgtgaaaataggacctgagcgcacctgttgtctatgtgatagacgtgccacatgcttttccactgcttcagacacttatgcctgttggcatcattctattggatttgattacgtctataatccgtttatgattgatgttcaacaatggggttttacaggtaacctacaaagcaaccatgatctgtattgtcaagtccatggtaatgcacatgtagctagttgtgatgcaatcatgactaggtgtctagctgtccacgagtgctttgttaagcgtgttgactggactattgaatatcctataattggtgatgaactgaagattaatgcggcttgtagaaaggttcaacacatggttgttaaagctgcattattagcagacaaattcccagttcttcacgacattggtaaccctaaagctattaagtgtgtacctcaagctgatgtagaatggaagttctatgatgcacagccttgtagtgacaaagcttataaaatagaagaattattctattcttatgccacacattctgacaaattcacagatggtgtatgcctattttggaattgcaatgtcgatagatatcctgctaattccattgtttgtagatttgacactagagtgctatctaaccttaacttgcctggttgtgatggtggcagtttgtatgtaaataaacatgcattccacacaccagcttttgataaaagtgcttttgttaatttaaaacaattaccatttttctattactctgacagtccatgtgagtctcatggaaaacaagtagtgtcagatatagattatgtaccactaaagtctgctacgtgtataacacgttgcaatttaggtggtgctgtctgtagacatcatgctaatgagtacagattgtatctcgatgcttataacatgatgatctcagctggctttagcttgtgggtttacaaacaatttgatacttataacctctggaacacttttacaagacttcagagtttagaaaatgtggcttttaatgttgtaaataagggacactttgatggacaacagggtgaagtaccagtttctatcattaataacactgtttacacaaaagttgatggtgttgatgtagaattgtttgaaaataaaacaacattacctgttaatgtagcatttgagctttgggctaagcgcaacattaaaccagtaccagaggtgaaaatactcaataatttgggtgtggacattgctgctaatactgtgatctgggactacaaaagagatgctccagcacatatatctactattggtgtttgttctatgactgacatagccaagaaaccaactgaaacgatttgtgcaccactcactgtcttttttgatggtagagttgatggtcaagtagacttatttagaaatgcccgtaatggtgttcttattacagaaggtagtgttaaaggtttacaaccatctgtaggtcccaaacaagctagtcttaatggagtcacattaattggagaagccgtaaaaacacagttcaattattataagaaagttgatggtgttgtccaacaattacctgaaacttactttactcagagtagaaatttacaagaatttaaacccaggagtcaaatggaaattgatttcttagaattagctatggatgaattcattgaacggtataaattagaaggctatgccttcgaacatatcgtttatggagattttagtcatagtcagttaggtggtttacatctactgattggactagctaaacgttttaaggaatcaccttttgaattagaagattttattcctatggacagtacagttaaaaactatttcataacagatgcgcaaacaggttcatctaagtgtgtgtgttctgttattgatttattacttgatgattttgttgaaataataaaatcccaagatttatctgtagtttctaaggttgtcaaagtgactattgactatacagaaatttcatttatgctttggtgtaaagatggccatgtagaaacattttacccaaaattacaatctagtcaagcgtggcaaccgggtgttgctatgcctaatctttacaaaatgcaaagaatgctattagaaaagtgtgaccttcaaaattatggtgatagtgcaacattacctaaaggcataatgatgaatgtcgcaaaatatactcaactgtgtcaatatttaaacacattaacattagctgtaccctataatatgagagttatacattttggtgctggttctgataaaggagttgcaccaggtacagctgttttaagacagtggttgcctacgggtacgctgcttgtcgattcagatcttaatgactttgtctctgatgcagattcaactttgattggtgattgtgcaactgtacatacagctaataaatgggatctcattattagtgatatgtacgaccctaagactaaaaatgttacaaaagaaaatgactctaaagagggttttttcacttacatttgtgggtttatacaacaaaagctagctcttggaggttccgtggctataaagataacagaacattcttggaatgctgatctttataagctcatgggacacttcgcatggtggacagcctttgttactaatgtgaatgcgtcatcatctgaagcatttttaattggatgtaattatcttggcaaaccacgcgaacaaatagatggttatgtcatgcatgcaaattacatattttggaggaatacaaatccaattcagttgtcttcctattctttatttgacatgagtaaatttccccttaaattaaggggtactgctgttatgtctttaaaagaaggtcaaatcaatgatatgattttatctcttcttagtaaaggtagacttataattagagaaaacaacagagttgttatttctagtgatgttcttgttaacaactaa

SEQ ID NO: 502 - DNA, 13218 bp, Severe acute respiratory syndrome coronavirus 2
  source 1..13218: mol_type = unassigned DNA
atggagagccttgtccctggtttcaacgagaaaacacacgtccaactcagtttgcctgttttacaggttcgcgacgtgctcgtacgtggctttggagactccgtggaggaggtcttatcagaggcacgtcaacatcttaaagatggcacttgtggcttagtagaagttgaaaaaggcgttttgcctcaacttgaacagccctatgtgttcatcaaacgttcggatgctcgaactgcacctcatggtcatgttatggttgagctggtagcagaactcgaaggcattcagtacggtcgtagtggtgagacacttggtgtccttgtccctcatgtgggcgaaataccagtggcttaccgcaaggttcttcttcgtaagaacggtaataaaggagctggtggccatagttacggcgccgatctaaagtcatttgacttaggcgacgagcttggcactgatccttatgaagattttcaagaaaactggaacactaaacatagcagtggtgttacccgtgaactcatgcgtgagcttaacggaggggcatacactcgctatgtcgataacaacttctgtggccctgatggctaccctcttgagtgcattaaagaccttctagcacgtgctggtaaagcttcatgcactttgtccgaacaactggactttattgacactaagaggggtgtatactgctgccgtgaacatgagcatgaaattgcttggtacacggaacgttctgaaaagagctatgaattgcagacaccttttgaaattaaattggcaaagaaatttgacaccttcaatggggaatgtccaaattttgtatttcccttaaattccataatcaagactattcaaccaagggttgaaaagaaaaagcttgatggctttatgggtagaattcgatctgtctatccagttgcgtcaccaaatgaatgcaaccaaatgtgcctttcaactctcatgaagtgtgatcattgtggtgaaacttcatggcagacgggcgattttgttaaagccacttgcgaattttgtggcactgagaatttgactaaagaaggtgccactacttgtggttacttaccccaaaatgctgttgttaaaatttattgtccagcatgtcacaattcagaagtaggacctgagcatagtcttgccgaataccataatgaatctggcttgaaaaccattcttcgtaagggtggtcgcactattgcctttggaggctgtgtgttctcttatgttggttgccataacaagtgtgcctattgggttccacgtgctagcgctaacataggttgtaaccatacaggtgttgttggagaaggttccgaaggtcttaatgacaaccttcttgaaatactccaaaaagagaaagtcaacatcaatattgttggtgactttaaacttaatgaagagatcgccattattttggcatctttttctgcttccacaagtgcttttgtggaaactgtgaaaggtttggattataaagcattcaaacaaattgttgaatcctgtggtaattttaaagttacaaaaggaaaagctaaaaaaggtgcctggaatattggtgaacagaaatcaatactgagtcctctttatgcatttgcatcagaggctgctcgtgttgtacgatcaattttctcccgcactcttgaaactgctcaaaattctgtgcgtgttttacagaaggccgctataacaatactagatggaatttcacagtattcactgagactcattgatgctatgatgttcacatctgatttggctactaacaatctagttgtaatggcctacattacaggtggtgttgttcagttgacttcgcagtggctaactaacatctttggcactgtttatgaaaaactcaaacccgtccttgattggcttgaagagaagtttaaggaaggtgtagagtttcttagagacggttgggaaattgttaaatttatctcaacctgtgcttgtgaaattgtcggtggacaaattgtcacctgtgcaaaggaaattaaggagagtgttcagacattctttaagcttgtaaataaatttttggctttgtgtgctgactctatcattattggtggagctaaacttaaagccttgaatttaggtgaaacatttgtcacgcactcaaagggattgtacagaaagtgtgttaaatccagagaagaaactggcctactcatgcctctaaaagccccaaaagaaattatcttcttagagggagaaacacttcccacagaagtgttaacagaggaagttgtcttgaaaactggtgatttacaaccattagaacaacctactagtgaagctgttgaagctccattggttggtacaccagtttgtattaacgggcttatgttgctcgaaatcaaagacacagaaaagtactgtgcccttgcacctaatatgatggtaacaaacaataccttcacactcaaaggcggtgcaccaacaaaggttacttttggtgatgacactgtgatagaagtgcaaggttacaagagtgtgaatatcacttttgaacttgatgaaaggattgataaagtacttaatgagaagtgctctgcctatacagttgaactcggtacagaagtaaatgagttcgcctgtgttgtggcagatgctgtcataaaaactttgcaaccagtatctgaattacttacaccactgggcattgatttagatgagtggagtatggctacatactacttatttgatgagtctggtgagtttaaattggcttcacatatgtattgttctttctaccctccagatgaggatgaagaagaaggtgattgtgaagaagaagagtttgagccatcaactcaatatgagtatggtactgaagatgattaccaaggtaaacctttggaatttggtgccacttctgctgctcttcaacctgaagaagagcaagaagaagattggttagatgatgatagtcaacaaactgttggtcaacaagacggcagtgaggacaatcagacaactactattcaaacaattgttgaggttcaacctcaattagagatggaacttacaccagttgttcagactattgaagtgaatagttttagtggttatttaaaacttactgacaatgtatacattaaaaatgcagacattgtggaagaagctaaaaaggtaaaaccaacagtggttgttaatgcagccaatgtttaccttaaacatggaggaggtgttgcaggagccttaaataaggctactaacaatgccatgcaagttgaatctgatgattacatagctactaatggaccacttaaagtgggtggtagttgtgttttaagcggacacaatcttgctaaacactgtcttcatgttgtcggcccaaatgttaacaaaggtgaagacattcaacttcttaagagtgcttatgaaaattttaatcagcacgaagttctacttgcaccattattatcagctggtatttttggtgctgaccctatacattctttaagagtttgtgtagatactgttcgcacaaatgtctacttagctgtctttgataaaaatctctatgacaaacttgtttcaagctttttggaaatgaagagtgaaaagcaagttgaacaaaagatcgctgagattcctaaagaggaagttaagccatttataactgaaagtaaaccttcagttgaacagagaaaacaagatgataagaaaatcaaagcttgtgttgaagaagttacaacaactctggaagaaactaagttcctcacagaaaacttgttactttatattgacattaatggcaatcttcatccagattctgccactcttgttagtgacattgacatcactttcttaaagaaagatgctccatatatagtgggtgatgttgttcaagagggtgttttaactgctgtggttatacctactaaaaaggctggtggcactactgaaatgctagcgaaagctttgagaaaagtgccaacagacaattatataaccacttacccgggtcagggtttaaatggttacactgtagaggaggcaaagacagtgcttaaaaagtgtaaaagtgccttttacattctaccatctattatctctaatgagaagcaagaaattcttggaactgtttcttggaatttgcgagaaatgcttgcacatgcagaagaaacacgcaaattaatgcctgtctgtgtggaaactaaagccatagtttcaactatacagcgtaaatataagggtattaaaatacaagagggtgtggttgattatggtgctagattttacttttacaccagtaaaacaactgtagcgtcacttatcaacacacttaacgatctaaatgaaactcttgttacaatgccacttggctatgtaacacatggcttaaatttggaagaagctgctcggtatatgagatctctcaaagtgccagctacagtttctgtttcttcacctgatgctgttacagcgtataatggttatcttacttcttcttctaaaacacctgaagaacattttattgaaaccatctcacttgctggttcctataaagattggtcctattctggacaatctacacaactaggtatagaatttcttaagagaggtgataaaagtgtatattacactagtaatcctaccacattccacctagatggtgaagttatcacctttgacaatcttaagacacttctttctttgagagaagtgaggactattaaggtgtttacaacagtagacaacattaacctccacacgcaagttgtggacatgtcaatgacatatggacaacagtttggtccaacttatttggatggagctgatgttactaaaataaaacctcataattcacatgaaggtaaaacattttatgttttacctaatgatgacactctacgtgttgaggcttttgagtactaccacacaactgatcctagttttctgggtaggtacatgtcagcattaaatcacactaaaaagtggaaatacccacaagttaatggtttaacttctattaaatgggcagataacaactgttatcttgccactgcattgttaacactccaacaaatagagttgaagtttaatccacctgctctacaagatgcttattacagagcaagggctggtgaagctgctaacttttgtgcacttatcttagcctactgtaataagacagtaggtgagttaggtgatgttagagaaacaatgagttacttgtttcaacatgccaatttagattcttgcaaaagagtcttgaacgtggtgtgtaaaacttgtggacaacagcagacaacccttaagggtgtagaagctgttatgtacatgggcacactttcttatgaacaatttaagaaaggtgttcagataccttgtacgtgtggtaaacaagctacaaaatatctagtacaacaggagtcaccttttgttatgatgtcagcaccacctgctcagtatgaacttaagcatggtacatttacttgtgctagtgagtacactggtaattaccagtgtggtcactataaacatataacttctaaagaaactttgtattgcatagacggtgctttacttacaaagtcctcagaatacaaaggtcctattacggatgttttctacaaagaaaacagttacacaacaaccataaaaccagttacttataaattggatggtgttgtttgtacagaaattgaccctaagttggacaattattataagaaagacaattcttatttcacagagcaaccaattgatcttgtaccaaaccaaccatatccaaacgcaagcttcgataattttaagtttgtatgtgataatatcaaatttgctgatgatttaaaccagttaactggttataagaaacctgcttcaagagagcttaaagttacatttttccctgacttaaatggtgatgtggtggctattgattataaacactacacaccctcttttaagaaaggagctaaattgttacataaacctattgtttggcatgttaacaatgcaactaataaagccacgtataaaccaaatacctggtgtatacgttgtctttggagcacaaaaccagttgaaacatcaaattcgtttgatgtactgaagtcagaggacgcgcagggaatggataatcttgcctgcgaagatctaaaaccagtctctgaagaagtagtggaaaatcctaccatacagaaagacgttcttgagtgtaatgtgaaaactaccgaagttgtaggagacattatacttaaaccagcaaataatagtttaaaaattacagaagaggttggccacacagatctaatggctgcttatgtagacaattctagtcttactattaagaaacctaatgaattatctagagtattaggtttgaaaacccttgctactcatggtttagctgctgttaatagtgtcccttgggatactatagctaattatgctaagccttttcttaacaaagttgttagtacaactactaacatagttacacggtgtttaaaccgtgtttgtactaattatatgccttatttctttactttattgctacaattgtgtacttttactagaagtacaaattctagaattaaagcatctatgccgactactatagcaaagaatactgttaagagtgtcggtaaattttgtctagaggcttcatttaattatttgaagtcacctaatttttctaaactgataaatattataatttggtttttactattaagtgtttgcctaggttctttaatctactcaaccgctgctttaggtgttttaatgtctaatttaggcatgccttcttactgtactggttacagagaaggctatttgaactctactaatgtcactattgcaacctactgtactggttctataccttgtagtgtttgtcttagtggtttagattctttagacacctatccttctttagaaactatacaaattaccatttcatcttttaaatgggatttaactgcttttggcttagttgcagagtggtttttggcatatattcttttcactaggtttttctatgtacttggattggctgcaatcatgcaattgtttttcagctattttgcagtacattttattagtaattcttggcttatgtggttaataattaatcttgtacaaatggccccgatttcagctatggttagaatgtacatcttctttgcatcattttattatgtatggaaaagttatgtgcatgttgtagacggttgtaattcatcaacttgtatgatgtgttacaaacgtaatagagcaacaagagtcgaatgtacaactattgttaatggtgttagaaggtccttttatgtctatgctaatggaggtaaaggcttttgcaaactacacaattggaattgtgttaattgtgatacattctgtgctggtagtacatttattagtgatgaagttgcgagagacttgtcactacagtttaaaagaccaataaatcctactgaccagtcttcttacatcgttgatagtgttacagtgaagaatggttccatccatctttactttgataaagctggtcaaaagacttatgaaagacattctctctctcattttgttaacttagacaacctgagagctaataacactaaaggttcattgcctattaatgttatagtttttgatggtaaatcaaaatgtgaagaatcatctgcaaaatcagcgtctgtttactacagtcagcttatgtgtcaacctatactgttactagatcaggcattagtgtctgatgttggtgatagtgcggaagttgcagttaaaatgtttgatgcttacgttaatacgttttcatcaacttttaacgtaccaatggaaaaactcaaaacactagttgcaactgcagaagctgaacttgcaaagaatgtgtccttagacaatgtcttatctacttttatttcagcagctcggcaagggtttgttgattcagatgtagaaactaaagatgttgttgaatgtcttaaattgtcacatcaatctgacatagaagttactggcgatagttgtaataactatatgctcacctataacaaagttgaaaacatgacaccccgtgaccttggtgcttgtattgactgtagtgcgcgtcatattaatgcgcaggtagcaaaaagtcacaacattgctttgatatggaacgttaaagatttcatgtcattgtctgaacaactacgaaaacaaatacgtagtgctgctaaaaagaataacttaccttttaagttgacatgtgcaactactagacaagttgttaatgttgtaacaacaaagatagcacttaagggtggtaaaattgttaataattggttgaagcagttaattaaagttacacttgtgttcctttttgttgctgctattttctatttaataacacctgttcatgtcatgtctaaacatactgacttttcaagtgaaatcataggatacaaggctattgatggtggtgtcactcgtgacatagcatctacagatacttgttttgctaacaaacatgctgattttgacacatggtttagccagcgtggtggtagttatactaatgacaaagcttgcccattgattgctgcagtcataacaagagaagtgggttttgtcgtgcctggtttgcctggcacgatattacgcacaactaatggtgactttttgcatttcttacctagagtttttagtgcagttggtaacatctgttacacaccatcaaaacttatagagtacactgactttgcaacatcagcttgtgttttggctgctgaatgtacaatttttaaagatgcttctggtaagccagtaccatattgttatgataccaatgtactagaaggttctgttgcttatgaaagtttacgccctgacacacgttatgtgctcatggatggctctattattcaatttcctaacacctaccttgaaggttctgttagagtggtaacaacttttgattctgagtactgtaggcacggcacttgtgaaagatcagaagctggtgtttgtgtatctactagtggtagatgggtacttaacaatgattattacagatctttaccaggagttttctgtggtgtagatgctgtaaatttacttactaatatgtttacaccactaattcaacctattggtgctttggacatatcagcatctatagtagctggtggtattgtagctatcgtagtaacatgccttgcctactattttatgaggtttagaagagcttttggtgaatacagtcatgtagttgcctttaatactttactattccttatgtcattcactgtactctgtttaacaccagtttactcattcttacctggtgtttattctgttatttacttgtacttgacattttatcttactaatgatgtttcttttttagcacatattcagtggatggttatgttcacacctttagtacctttctggataacaattgcttatatcatttgtatttccacaaagcatttctattggttctttagtaattacctaaagagacgtgtagtctttaatggtgtttcctttagtacttttgaagaagctgcgctgtgcacctttttgttaaataaagaaatgtatctaaagttgcgtagtgatgtgctattacctcttacgcaatataatagatacttagctctttataataagtacaagtattttagtggagcaatggatacaactagctacagagaagctgcttgttgtcatctcgcaaaggctctcaatgacttcagtaactcaggttctgatgttctttaccaaccaccacaaacctctatcacctcagctgttttgcagagtggttttagaaaaatggcattcccatctggtaaagttgagggttgtatggtacaagtaacttgtggtacaactacacttaacggtctttggcttgatgacgtagtttactgtccaagacatgtgatctgcacctctgaagacatgcttaaccctaattatgaagatttactcattcgtaagtctaatcataatttcttggtacaggctggtaatgttcaactcagggttattggacattctatgcaaaattgtgtacttaagcttaaggttgatacagccaatcctaagacacctaagtataagtttgttcgcattcaaccaggacagactttttcagtgttagcttgttacaatggttcaccatctggtgtttaccaatgtgctatgaggcccaatttcactattaagggttcattccttaatggttcatgtggtagtgttggttttaacatagattatgactgtgtctctttttgttacatgcaccatatggaattaccaactggagttcatgctggcacagacttagaaggtaacttttatggaccttttgttgacaggcaaacagcacaagcagctggtacggacacaactattacagttaatgttttagcttggttgtacgctgctgttataaatggagacaggtggtttctcaatcgatttaccacaactcttaatgactttaaccttgtggctatgaagtacaattatgaacctctaacacaagaccatgttgacatactaggacctctttctgctcaaactggaattgccgttttagatatgtgtgcttcattaaaagaattactgcaaaatggtatgaatggacgtaccatattgggtagtgctttattagaagatgaatttacaccttttgatgttgttagacaatgctcaggtgttactttccaaagtgcagtgaaaagaacaatcaagggtacacaccactggttgttactcacaattttgacttcacttttagttttagtccagagtactcaatggtctttgttcttttttttgtatgaaaatgcctttttaccttttgctatgggtattattgctatgtctgcttttgcaatgatgtttgtcaaacataagcatgcatttctctgtttgtttttgttaccttctcttgccactgtagcttattttaatatggtctatatgcctgctagttgggtgatgcgtattatgacatggttggatatggttgatactagtttgtctggttttaagctaaaagactgtgttatgtatgcatcagctgtagtgttactaatccttatgacagcaagaactgtgtatgatgatggtgctaggagagtgtggacacttatgaatgtcttgacactcgtttataaagtttattatggtaatgctttagatcaagccatttccatgtgggctcttataatctctgttacttctaactactcaggtgtagttacaactgtcatgtttttggccagaggtattgtttttatgtgtgttgagtattgccctattttcttcataactggtaatacacttcagtgtataatgctagtttattgtttcttaggctatttttgtacttgttactttggcctcttttgtttactcaaccgctactttagactgactcttggtgtttatgattacttagtttctacacaggagtttagatatatgaattcacagggactactcccacccaagaatagcatagatgccttcaaactcaacattaaattgttgggtgttggtggcaaaccttgtatcaaagtagccactgtacagtctaaaatgtcagatgtaaagtgcacatcagtagtcttactctcagttttgcaacaactcagagtagaatcatcatctaaattgtgggctcaatgtgtccagttacacaatgacattctcttagctaaagatactactgaagcctttgaaaaaatggtttcactactttctgttttgctttccatgcagggtgctgtagacataaacaagctttgtgaagaaatgctggacaacagggcaaccttacaagctatagcctcagagtttagttcccttccatcatatgcagcttttgctactgctcaagaagcttatgagcaggctgttgctaatggtgattctgaagttgttcttaaaaagttgaagaagtctttgaatgtggctaaatctgaatttgaccgtgatgcagccatgcaacgtaagttggaaaagatggctgatcaagctatgacccaaatgtataaacaggctagatctgaggacaagagggcaaaagttactagtgctatgcagacaatgcttttcactatgcttagaaagttggataatgatgcactcaacaacattatcaacaatgcaagagatggttgtgttcccttgaacataatacctcttacaacagcagccaaactaatggttgtcataccagactataacacatataaaaatacgtgtgatggtacaacatttacttatgcatcagcattgtgggaaatccaacaggttgtagatgcagatagtaaaattgttcaacttagtgaaattagtatggacaattcacctaatttagcatggcctcttattgtaacagctttaagggccaattctgctgtcaaattacagaataatgagcttagtcctgttgcactacgacagatgtcttgtgctgccggtactacacaaactgcttgcactgatgacaatgcgttagcttactacaacacaacaaagggaggtaggtttgtacttgcactgttatccgatttacaggatttgaaatgggctagattccctaagagtgatggaactggtactatctatacagaactggaaccaccttgtaggtttgttacagacacacctaaaggtcctaaagtgaagtatttatactttattaaaggattaaacaacctaaatagaggtatggtacttggtagtttagctgccacagtacgtctacaagctggtaatgcaacagaagtgcctgccaattcaactgtattatctttctgtgcttttgctgtagatgctgctaaagcttacaaagattatctagctagtgggggacaaccaatcactaattgtgttaagatgttgtgtacacacactggtactggtcaggcaataacagttacaccggaagccaatatggatcaagaatcctttggtggtgcatcgtgttgtctgtactgccgttgccacatagatcatccaaatcctaaaggattttgtgacttaaaaggtaagtatgtacaaatacctacaacttgtgctaatgaccctgtgggttttacacttaaaaacacagtctgtaccgtctgcggtatgtggaaaggttatggctgtagttgtgatcaactccgcgaacccatgcttcagtcagctgatgcacaatcgtttttaaacgggtttgcggtgtaa

SEQ ID NO: 503 - DNA, 3822 bp, Severe acute respiratory syndrome coronavirus 2; identical to SEQ ID NO: 3
  source 1..3822: mol_type = unassigned DNA

SEQ ID NO: 504 - DNA, 828 bp, Severe acute respiratory syndrome coronavirus 2; identical to SEQ ID NO: 304
  source 1..828: mol_type = unassigned DNA

SEQ ID NO: 505 - DNA, 228 bp, Severe acute respiratory syndrome coronavirus 2; identical to SEQ ID NO: 305
  source 1..228: mol_type = unassigned DNA

SEQ ID NO: 506 - DNA, 669 bp, Severe acute respiratory syndrome coronavirus 2; identical to SEQ ID NO: 306
  source 1..669: mol_type = unassigned DNA

SEQ ID NO: 507 - DNA, 186 bp, Severe acute respiratory syndrome coronavirus 2; identical to SEQ ID NO: 307
  source 1..186: mol_type = unassigned DNA

SEQ ID NO: 508 - DNA, 366 bp, Severe acute respiratory syndrome coronavirus 2; identical to SEQ ID NO: 308
  source 1..366: mol_type = unassigned DNA

SEQ ID NO: 509 - DNA, 132 bp, Severe acute respiratory syndrome coronavirus 2; identical to SEQ ID NO: 309
  source 1..132: mol_type = unassigned DNA

SEQ ID NO: 510 - DNA, 366 bp, Severe acute respiratory syndrome coronavirus 2; identical to SEQ ID NO: 322
  source 1..366: mol_type = unassigned DNA

SEQ ID NO: 511 - DNA, 1260 bp, Severe acute respiratory syndrome coronavirus 2; identical to SEQ ID NO: 323
  source 1..1260: mol_type = unassigned DNA

SEQ ID NO: 512 - DNA, 117 bp, Severe acute respiratory syndrome coronavirus 2; identical to SEQ ID NO: 312
  source 1..117: mol_type = unassigned DNA

SEQ ID NO: 513-550 - skipped (38 entries)

SEQ ID NO: 551 - protein, 7096 aa, Severe acute respiratory syndrome coronavirus 2 [sequence omitted]

SEQ ID NO: 552 - protein, 4405 aa, Severe acute respiratory syndrome coronavirus 2 [sequence omitted]

SEQ ID NO: 553 - protein, 1273 aa, Severe acute respiratory syndrome coronavirus 2; identical to SEQ ID NO: 2

SEQ ID NO: 554 - protein, 275 aa, Severe acute respiratory syndrome coronavirus 2; identical to SEQ ID NO: 404

SEQ ID NO: 555 - protein, 75 aa, Severe acute respiratory syndrome coronavirus 2; identical to SEQ ID NO: 405

SEQ ID NO: 556 - protein, 222 aa, Severe acute respiratory syndrome coronavirus 2; identical to SEQ ID NO: 406

SEQ ID NO: 557 - protein, 61 aa, Severe acute respiratory syndrome coronavirus 2; identical to SEQ ID NO: 407

SEQ ID NO: 558 - protein, 121 aa, Severe acute respiratory syndrome coronavirus 2; identical to SEQ ID NO: 408

SEQ ID NO: 559 - protein, 43 aa, Severe acute respiratory syndrome coronavirus 2; identical to SEQ ID NO: 409

SEQ ID NO: 560 - protein, 121 aa, Severe acute respiratory syndrome coronavirus 2; identical to SEQ ID NO: 422

SEQ ID NO: 561 - protein, 419 aa, Severe acute respiratory syndrome coronavirus 2; identical to SEQ ID NO: 423

SEQ ID NO: 562 - protein, 38 aa, Severe acute respiratory syndrome coronavirus 2; identical to SEQ ID NO: 412

SEQ ID NO: 563-600 - skipped (38 entries)

SEQ ID NO: 601 - DNA, 4308 bp, Human immunodeficiency virus 1
  source 1..4308: mol_type = unassigned DNA
atgggtgcgagagcgtcagtattaagcgggggagaattagatcgatgggaaaaaattcggttaaggccagggggaaagaaaaaatataaattaaaacatatagtatgggcaagcagggagctagaacgattcgcagttaatcctggcctgttagaaacatcagaaggctgtagacaaatactgggacagctacaaccatcccttcagacaggatcagaagaacttagatcattatataatacagtagcaaccctctattgtgtgcatcaaaggatagagataaaagacaccaaggaagctttagacaagatagaggaagagcaaaacaaaagtaagaaaaaagcacagcaagcagcagctgacacaggacacagcaatcaggtcagccaaaattaccctatagtgcagaacatccaggggcaaatggtacatcaggccatatcacctagaactttaaatgcatgggtaaaagtagtagaagagaaggctttcagcccagaagtgatacccatgttttcagcattatcagaaggagccaccccacaagatttaaacaccatgctaaacacagtggggggacatcaagcagccatgcaaatgttaaaagagaccatcaatgaggaagctgcagaatgggatagagtgcatccagtgcatgcagggcctattgcaccaggccagatgagagaaccaaggggaagtgacatagcaggaactactagtacccttcaggaacaaataggatggatgacaaataatccacctatcccagtaggagaaatttataaaagatggataatcctgggattaaataaaatagtaagaatgtatagccctaccagcattctggacataagacaaggaccaaaggaaccctttagagactatgtagaccggttctataaaactctaagagccgagcaagcttcacaggaggtaaaaaattggatgacagaaaccttgttggtccaaaatgcgaacccagattgtaagactattttaaaagcattgggaccagcggctacactagaagaaatgatgacagcatgtcagggagtaggaggacccggccataaggcaagagttttggctgaagcaatgagccaagtaacaaattcagctaccataatgatgcagagaggcaattttaggaaccaaagaaagattgttaagtgtttcaattgtggcaaagaagggcacacagccagaaattgcagggcccctaggaaaaagggctgttggaaatgtggaaaggaaggacaccaaatgaaagattgtactgagagacaggctaattttttaagggaagatctggccttcctacaagggaaggccagggaattttcttcagagcagaccagagccaacagccccaccagaagagagcttcaggtctggggtagagacaacaactccccctcagaagcaggagccgatagacaaggaactgtatcctttaacttccctcaggtcactctttggcaacgacccctcgtcacaataaagataggggggcaactaaaggaagctctattagatacaggagcagatgatacagtattagaagaaatgagtttgccaggaagatggaaaccaaaaatgatagggggaattggaggttttatcaaagtaagacagtatgatcagatactcatagaaatctgtggacataaagctataggtacagtattagtaggacctacacctgtcaacataattggaagaaatctgttgactcagattggttgcactttaaattttcccattagccctattgagactgtaccagtaaaattaaagccaggaatggatggcccaaaagttaaacaatggccattgacagaagaaaaaataaaagcattagtagaaatttgtacagagatggaaaaggaagggaaaatttcaaaaattgggcctgaaaatccatacaatactccagtatttgccataaagaaaaaagacagtactaaatggagaaaattagtagatttcagagaacttaataagagaactcaagacttctgggaagttcaattaggaataccacatcccgcagggttaaaaaagaaaaaatcagtaacagtactggatgtgggtgatgcatatttttcagttcccttagatgaagacttcaggaagtatactgcatttaccatacctagtataaacaatgagacaccagggattagatatcagtacaatgtgcttccacagggatggaaaggatcaccagcaatattccaaagtagcatgacaaaaatcttagagccttttagaaaacaaaatccagacatagttatctatcaatacatggatgatttgtatgtaggatctgacttagaaatagggcagcatagaacaaaaatagaggagctgagacaacatctgttgaggtggggacttaccacaccagacaaaaaacatcagaaagaacctccattcctttggatgggttatgaactccatcctgataaatggacagtacagcctatagtgctgccagaaaaagacagctggactgtcaatgacatacagaagttagtggggaaattgaattgggcaagtcagatttacccagggattaaagtaaggcaattatgtaaactccttagaggaaccaaagcactaacagaagtaataccactaacagaagaagcagagctagaactggcagaaaacagagagattctaaaagaaccagtacatggagtgtattatgacccatcaaaagacttaatagcagaaatacagaagcaggggcaaggccaatggacatatcaaatttatcaagagccatttaaaaatctgaaaacaggaaaatatgcaagaatgaggggtgcccacactaatgatgtaaaacaattaacagaggcagtgcaaaaaataaccacagaaagcatagtaatatggggaaagactcctaaatttaaactgcccatacaaaaggaaacatgggaaacatggtggacagagtattggcaagccacctggattcctgagtgggagtttgttaatacccctcccttagtgaaattatggtaccagttagagaaagaacccatagtaggagcagaaaccttctatgtagatggggcagctaacagggagactaaattaggaaaagcaggatatgttactaatagaggaagacaaaaagttgtcaccctaactgacacaacaaatcagaagactgagttacaagcaatttatctagctttgcaggattcgggattagaagtaaacatagtaacagactcacaatatgcattaggaatcattcaagcacaaccagatcaaagtgaatcagagttagtcaatcaaataatagagcagttaataaaaaaggaaaaggtctatctggcatgggtaccagcacacaaaggaattggaggaaatgaacaagtagataaattagtcagtgctggaatcaggaaagtactatttttagatggaatagataaggcccaagatgaacatgagaaatatcacagtaattggagagcaatggctagtgattttaacctgccacctgtagtagcaaaagaaatagtagccagctgtgataaatgtcagctaaaaggagaagccatgcatggacaagtagactgtagtccaggaatatggcaactagattgtacacatttagaaggaaaagttatcctggtagcagttcatgtagccagtggatatatagaagcagaagttattccagcagaaacagggcaggaaacagcatattttcttttaaaattagcaggaagatggccagtaaaaacaatacatactgacaatggcagcaatttcaccggtgctacggttagggccgcctgttggtgggcgggaatcaagcaggaatttggaattccctacaatccccaaagtcaaggagtagtagaatctatgaataaagaattaaagaaaattataggacaggtaagagatcaggctgaacatcttaagacagcagtacaaatggcagtattcatccacaattttaaaagaaaaggggggattggggggtacagtgcaggggaaagaatagtagacataatagcaacagacatacaaactaaagaattacaaaaacaaattacaaaaattcaaaattttcgggtttattacagggacagcagaaatccactttggaaaggaccagcaaagctcctctggaaaggtgaaggggcagtagtaatacaagataatagtgacataaaagtagtgccaagaagaaaagcaaagatcattagggattatggaaaacagatggcaggtgatgattgtgtggcaagtagacaggatgaggattag

SEQ ID NO: 602 - DNA, 1503 bp, Human immunodeficiency virus 1
  source 1..1503: mol_type = unassigned DNA
atgggtgcgagagcgtcagtattaagcgggggagaattagatcgatgggaaaaaattcggttaaggccagggggaaagaaaaaatataaattaaaacatatagtatgggcaagcagggagctagaacgattcgcagttaatcctggcctgttagaaacatcagaaggctgtagacaaatactgggacagctacaaccatcccttcagacaggatcagaagaacttagatcattatataatacagtagcaaccctctattgtgtgcatcaaaggatagagataaaagacaccaaggaagctttagacaagatagaggaagagcaaaacaaaagtaagaaaaaagcacagcaagcagcagctgacacaggacacagcaatcaggtcagccaaaattaccctatagtgcagaacatccaggggcaaatggtacatcaggccatatcacctagaactttaaatgcatgggtaaaagtagtagaagagaaggctttcagcccagaagtgatacccatgttttcagcattatcagaaggagccaccccacaagatttaaacaccatgctaaacacagtggggggacatcaagcagccatgcaaatgttaaaagagaccatcaatgaggaagctgcagaatgggatagagtgcatccagtgcatgcagggcctattgcaccaggccagatgagagaaccaaggggaagtgacatagcaggaactactagtacccttcaggaacaaataggatggatgacaaataatccacctatcccagtaggagaaatttataaaagatggataatcctgggattaaataaaatagtaagaatgtatagccctaccagcattctggacataagacaaggaccaaaggaaccctttagagactatgtagaccggttctataaaactctaagagccgagcaagcttcacaggaggtaaaaaattggatgacagaaaccttgttggtccaaaatgcgaacccagattgtaagactattttaaaagcattgggaccagcggctacactagaagaaatgatgacagcatgtcagggagtaggaggacccggccataaggcaagagttttggctgaagcaatgagccaagtaacaaattcagctaccataatgatgcagagaggcaattttaggaaccaaagaaagattgttaagtgtttcaattgtggcaaagaagggcacacagccagaaattgcagggcccctaggaaaaagggctgttggaaatgtggaaaggaaggacaccaaatgaaagattgtactgagagacaggctaattttttagggaagatctggccttcctacaagggaaggccagggaattttcttcagagcagaccagagccaacagccccaccagaagagagcttcaggtctggggtagagacaacaactccccctcagaagcaggagccgatagacaaggaactgtatcctttaacttccctcaggtcactctttggcaacgacccctcgtcacaataa

SEQ ID NO: 603 - DNA, 579 bp, Human immunodeficiency virus 1
  source 1..579: mol_type = unassigned DNA
atggaaaacagatggcaggtgatgattgtgtggcaagtagacaggatgaggattagaacatggaaaagtttagtaaaacaccatatgtatgtttcagggaaagctaggggatggttttatagacatcactatgaaagccctcatccaagaataagttcagaagtacacatcccactaggggatgctagattggtaataacaacatattggggtctgcatacaggagaaagagactggcatttgggtcagggagtctccatagaatggaggaaaaagagatatagcacacaagtagaccctgaactagcagaccaactaattcatctgtattactttgactgtttttcagactctgctataagaaaggccttattaggacacatagttagccctaggtgtgaatatcaagcaggacataacaaggtaggatctctacaatacttggcactagcagcattaataacaccaaaaaagataaagccacctttgcctagtgttacgaaactgacagaggatagatggaacaagccccagaagaccaagggccacagagggagccacacaatgaatggacactag

SEQ ID NO: 604 - DNA, 291 bp, Human immunodeficiency virus 1
  source 1..291: mol_type = unassigned DNA
atggaacaagccccagaagaccaagggccacagagggagccacacaatgaatggacactagagcttttagaggagcttaagaatgaagctgttagacattttcctaggatttggctccatggcttagggcaacatatctatgaaacttatggggatacttgggcaggagtggaagccataataagaattctgcaacaactgctgtttatccatttcagaattgggtgtcgacatagcagaataggcgttactcgacagaggagagcaagaaatggagccagtagatcctag

SEQ ID NO: 605 - DNA, 261 bp, Human immunodeficiency virus 1
  source 1..261: mol_type = unassigned DNA
atggagccagtagatcctagactagagccctggaagcatccaggaagtcagcctaaaactgcttgtaccaattgctattgtaaaaagtgttgctttcattgccaagtttgtttcataacaaaagccttaggcatctcctatggcaggaagaagcggagacagcgacgaagagctcatcagaacagtcagactcatcaagcttctctatcaaagcaacccacctcccaaccccgaggggacccgacaggcccgaaggaatag

SEQ ID NO: 606 - DNA, 351 bp, Human immunodeficiency virus 1
  source 1..351: mol_type = unassigned DNA
atggcaggaagaagcggagacagcgacgaagagctcatcagaacagtcagactcatcaagcttctctatcaaagcaacccacctcccaaccccgaggggacccgacaggcccgaaggaatagaagaagaaggtggagagagagacagagacagatccattcgattagtgaacggatccttggcacttatctgggacgatctgcggagcctgtgcctcttcagctaccaccgcttgagagacttactcttgattgtaacgaggattgtggaacttctgggacgcagggggtgggaagccctcaaatattggtggaatctcctacagtattggagtcaggaactaaagaatag

SEQ ID NO: 607 - DNA, 249 bp, Human immunodeficiency virus 1
  source 1..249: mol_type = unassigned DNA
atgcaacctataccaatagtagcaatagtagcattagtagtagcaataataatagcaatagttgtgtggtccatagtaatcatagaatataggaaaatattaagacaaagaaaaatagacaggttaattgatagactaatagaaagagcagaagacagtggcaatgagagtgaaggagaaatatcagcacttgtggagatgggggtggagatggggcaccatgctccttgggatgttgatgatctgtag

SEQ ID NO: 608 - DNA, 2571 bp, Human immunodeficiency virus 1
  source 1..2571: mol_type = unassigned DNA
atgagagtgaaggagaaatatcagcacttgtggagatgggggtggagatggggcaccatgctccttgggatgttgatgatctgtagtgctacagaaaaattgtgggtcacagtctattatggggtacctgtgtggaaggaagcaaccaccactctattttgtgcatcagatgctaaagcatatgatacagaggtacataatgtttgggccacacatgcctgtgtacccacagaccccaacccacaagaagtagtattggtaaatgtgacagaaaattttaacatgtggaaaaatgacatggtagaacagatgcatgaggatataatcagtttatgggatcaaagcctaaagccatgtgtaaaattaaccccactctgtgttagtttaaagtgcactgatttgaagaatgatactaataccaatagtagtagcgggagaatgataatggagaaaggagagataaaaaactgctctttcaatatcagcacaagcataagaggtaaggtgcagaaagaatatgcatttttttataaacttgatataataccaatagataatgatactaccagctataagttgacaagttgtaacacctcagtcattacacaggcctgtccaaaggtatcctttgagccaattcccatacattattgtgccccggctggttttgcgattctaaaatgtaataataagacgttcaatggaacaggaccatgtacaaatgtcagcacagtacaatgtacacatggaattaggccagtagtatcaactcaactgctgttaaatggcagtctagcagaagaagaggtagtaattagatctgtcaatttcacggacaatgctaaaaccataatagtacagctgaacacatctgtagaaattaattgtacaagacccaacaacaatacaagaaaaagaatccgtatccagagaggaccagggagagcatttgttacaataggaaaaataggaaatatgagacaagcacattgtaacattagtagagcaaaatggaataacactttaaaacagatagctagcaaattaagagaacaatttggaaataataaaacaataatctttaagcaatcctcaggaggggacccagaaattgtaacgcacagttttaattgtggaggggaatttttctactgtaattcaacacaactgtttaatagtacttggtttaatagtacttggagtactgaagggtcaaataacactgaaggaagtgacacaatcaccctcccatgcagaataaaacaaattataaacatgtggcagaaagtaggaaaagcaatgtatgcccctcccatcagtggacaaattagatgttcatcaaatattacagggctgctattaacaagagatggtggtaatagcaacaatgagtccgagatcttcagacctggaggaggagatatgagggacaattggagaagtgaattatataaatataaagtagtaaaaattgaaccattaggagtagcacccaccaaggcaaagagaagagtggtgcagagagaaaaaagagcagtgggaataggagctttgttccttgggttcttgggagcagcaggaagcactatgggcgcagcctcaatgacgctgacggtacaggccagacaattattgtctggtatagtgcagcagcagaacaatttgctgagggctattgaggcgcaacagcatctgttgcaactcacagtctggggcatcaagcagctccaggcaagaatcctggctgtggaaagatacctaaaggatcaacagctcctggggatttggggttgctctggaaaactcatttgcaccactgctgtgccttggaatgctagttggagtaataaatctctggaacagatttggaatcacacgacctggatggagtgggacagagaaattaacaattacacaagcttaatacactccttaattgaagaatcgcaaaaccagcaagaaaagaatgaacaagaattattggaattagataaatgggcaagtttgtggaattggtttaacataacaaattggctgtggtatataaaattattcataatgatagtaggaggcttggtaggtttaagaatagtttttgctgtactttctatagtgaatagagttaggcagggatattcaccattatcgtttcagacccacctcccaaccccgaggggacccgacaggcccgaaggaatagaagaagaaggtggagagagagacagagacagatccattcgattagtgaacggatccttggcacttatctgggacgatctgcggagcctgtgcctcttcagctaccaccgcttgagagacttactcttgattgtaacgaggattgtggaacttctgggacgcagggggtgggaagccctcaaatattggtggaatctcctacagtattggagtcaggaactaaagaatagtgctgttagcttgctcaatgccacagccatagcagtagctgaggggacagatagggttatagaagtagtacaaggagcttgtagagctattcgccacatacctagaagaataagacagggcttggaaaggattttgctataa

SEQ ID NO: 609 - DNA, 570 bp, Human immunodeficiency virus 1
  source 1..570: mol_type = unassigned DNA
atgccccagactgtgagttgcaacagatgctgttgcgcctcaatagccctcagcaaattgttctgctgctgcactataccagacaataattgtctggcctgtaccgtcagcgtcattgaggctgcgcccatagtgcttcctgctgctcccaagaacccaaggaacaaagctcctattcccactgctcttttttctctctgcaccactcttctctttgccttggtgggtgctactcctaatggttcaatttttactactttatatttatataattcacttctccaattgtccctcatatctcctcctccaggtctgaagatctcggactcattgttgctattaccaccatctcttgttaatagcagccctgtaatatttgatgaacatctaatttgtccactgatgggaggggcatacattgcttttcctactttctgccacatgtttataatttgttttattctgcatgggagggtgattgtgtcacttccttcagtgttatttgacccttcagtactccaagtactattaaaccaagtactattaaacagttgtgttgaattacagtag

SEQ ID NO: 610 - DNA, 621 bp, Human immunodeficiency virus 1
  source 1..621: mol_type = unassigned DNA
atgggtggcaagtggtcaaaaagtagtgtgattggatggcctactgtaagggaaagaatgagacgagctgagccagcagcagatagggtgggagcagcatctcgagacctggaaaaacatggagcaatcacaagtagcaatacagcagctaccaatgctgcttgtgcctggctagaagcacaagaggaggaggaggtgggttttccagtcacacctcaggtacctttaagaccaatgacttacaaggcagctgtagatcttagccactttttaaaagaaaaggggggactggaagggctaattcactcccaaagaagacaagatatccttgatctgtggatctaccacacacaaggctacttccctgattagcagaactacacaccagggccaggggtcagatatccactgacctttggatggtgctacaagctagtaccagttgagccagataagatagaagaggccaataaaggagagaacaccagcttgttacaccctgtgagcctgcatgggatggatgacccggagagagaagtgttagagtggaggtttgacagccgcctagcatttcatcacgtggcccgagagctgcatccggagtacttcaagaactgctga

SEQ ID NO: 611-650 - skipped (40 entries)

SEQ ID NO: 651 - protein, 1435 aa, Human immunodeficiency virus 1
MGARASVLSGGELDRWEKIRLRPGGKKKYKLKHIVWASRELERFAVNPGLLETSEGCRQILGQLQPSLQTGSEELRSLYNTVATLYCVHQRIEIKDTKEALDKIEEEQNKSKKKAQQAAADTGHSNQVSQNYPIVQNIQGQMVHQAISPRTLNAWVKVVEEKAFSPEVIPMFSALSEGATPQDLNTMLNTVGGHQAAMQMLKETINEEAAEWDRVHPVHAGPIAPGQMREPRGSDIAGTTSTLQEQIGWMTNNPPIPVGEIYKRWIILGLNKIVRMYSPTSILDIRQGPKEPFRDYVDRFYKTLRAEQASQEVKNWMTETLLVQNANPDCKTILKALGPAATLEEMMTACQGVGGPGHKARVLAEAMSQVTNSATIMMQRGNFRNQRKIVKCFNCGKEGHTARNCRAPRKKGCWKCGKEGHQMKDCTERQANFLREDLAFLQGKAREFSSEQTRANSPTRRELQVWGRDNNSPSEAGADRQGTVSFNFPQVTLWQRPLVTIKIGGQLKEALLDTGADDTVLEEMSLPGRWKPKMIGGIGGFIKVRQYDQILIEICGHKAIGTVLVGPTPVNIIGRNLLTQIGCTLNFPISPIETVPVKLKPGMDGPKVKQWPLTEEKIKALVEICTEMEKEGKISKIGPENPYNTPVFAIKKKDSTKWRKLVDFRELNKRTQDFWEVQLGIPHPAGLKKKKSVTVLDVGDAYFSVPLDEDFRKYTAFTIPSINNETPGIRYQYNVLPQGWKGSPAIFQSSMTKILEPFRKQNPDIVIYQYMDDLYVGSDLEIGQHRTKIEELRQHLLRWGLTTPDKKHQKEPPFLWMGYELHPDKWTVQPIVLPEKDSWTVNDIQKLVGKLNWASQIYPGIKVRQLCKLLRGTKALTEVIPLTEEAELELAENREILKEPVHGVYYDPSKDLIAEIQKQGQGQWTYQIYQEPFKNLKTGKYARMRGAHTNDVKQLTEAVQKITTESIVIWGKTPKFKLPIQKETWETWWTEYWQATWIPEWEFVNTPPLVKLWYQLEKEPIVGAETFYVDGAANRETKLGKAGYVTNRGRQKVVTLTDTTNQKTELQAIYLALQDSGLEVNIVTDSQYALGIIQAQPDQSESELVNQIIEQLIKKEKVYLAWVPAHKGIGGNEQVDKLVSAGIRKVLFLDGIDKAQDEHEKYHSNWRAMASDFNLPPVVAKEIVASCDKCQLKGEAMHGQVDCSPGIWQLDCTHLEGKVILVAVHVASGYIEAEVIPAETGQETAYFLLKLAGRWPVKTIHTDNGSNFTGATVRAACWWAGIKQEFGIPYNPQSQGVVESMNKELKKIIGQVRDQAEHLKTAVQMAVFIHNFKRKGGIGGYSAGERIVDIIATDIQTKELQKQITKIQNFRVYYRDSRNPLWKGPAKLLWKGEGAVVIQDNSDIKVVPRRKAKIIRDYGKQMAGDDCVASRQDED

SEQ ID NO: 652 - protein, 500 aa, Human immunodeficiency virus 1
MGARASVLSGGELDRWEKIRLRPGGKKKYKLKHIVWASRELERFAVNPGLLETSEGCRQILGQLQPSLQTGSEELRSLYNTVATLYCVHQRIEIKDTKEALDKIEEEQNKSKKKAQQAAADTGHSNQVSQNYPIVQNIQGQMVHQAISPRTLNAWVKVVEEKAFSPEVIPMFSALSEGATPQDLNTMLNTVGGHQAAMQMLKETINEEAAEWDRVHPVHAGPIAPGQMREPRGSDIAGTTSTLQEQIGWMTNNPPIPVGEIYKRWIILGLNKIVRMYSPTSILDIRQGPKEPFRDYVDRFYKTLRAEQASQEVKNWMTETLLVQNANPDCKTILKALGPAATLEEMMTACQGVGGPGHKARVLAEAMSQVTNSATIMMQRGNFRNQRKIVKCFNCGKEGHTARNCRAPRKKGCWKCGKEGHQMKDCTERQANFLGKIWPSYKGRPGNFLQSRPEPTAPPEESFRSGVETTTPPQKQEPIDKELYPLTSLRSLFGNDPSSQ

SEQ ID NO: 653 - protein, 192 aa, Human immunodeficiency virus 1
MENRWQVMIVWQVDRMRIRTWKSLVKHHMYVSGKARGWFYRHHYESPHPRISSEVHIPLGDARLVITTYWGLHTGERDWHLGQGVSIEWRKKRYSTQVDPELADQLIHLYYFDCFSDSAIRKALLGHIVSPRCEYQAGHNKVGSLQYLALAALITPKKIKPPLPSVTKLTEDRWNKPQKTKGHRGSHTMNGH

SEQ ID NO: 654 - protein, 96 aa, Human immunodeficiency virus 1
MEQAPEDQGPQREPHNEWTLELLEELKNEAVRHFPRIWLHGLGQHIYETYGDTWAGVEAIIRILQQLLFIHFRIGCRHSRIGVTRQRRARNGASRS

SEQ ID NO: 655 - protein, 86 aa, Human immunodeficiency virus 1
MEPVDPRLEPWKHPGSQPKTACTNCYCKKCCFHCQVCFITKALGISYGRKKRRQRRRAHQNSQTHQASLSKQPTSQPRGDPTGPKE

SEQ ID NO: 656 - protein, 116 aa, Human immunodeficiency virus 1
MAGRSGDSDEELIRTVRLIKLLYQSNPPPNPEGTRQARRNRRRRWRERQRQIHSISERILGTYLGRSAEPVPLQLPPLERLTLDCNEDCGTSGTQGVGSPQILVESPTVLESGTKE

SEQ ID NO: 657 - protein, 82 aa, Human immunodeficiency virus 1
MQPIPIVAIVALVVAIIIAIVVWSIVIIEYRKILRQRKIDRLIDRLIERAEDSGNESEGEISALVEMGVEMGHHAPWDVDDL

SEQ ID NO: 658 - protein, 856 aa, Human immunodeficiency virus 1
MRVKEKYQHLWRWGWRWGTMLLGMLMICSATEKLWVTVYYGVPVWKEATTTLFCASDAKAYDTEVHNVWATHACVPTDPNPQEVVLVNVTENFNMWKNDMVEQMHEDIISLWDQSLKPCVKLTPLCVSLKCTDLKNDTNTNSSSGRMIMEKGEIKNCSFNISTSIRGKVQKEYAFFYKLDIIPIDNDTTSYKLTSCNTSVITQACPKVSFEPIPIHYCAPAGFAILKCNNKTFNGTGPCTNVSTVQCTHGIRPVVSTQLLLNGSLAEEEVVIRSVNFTDNAKTIIVQLNTSVEINCTRPNNNTRKRIRIQRGPGRAFVTIGKIGNMRQAHCNISRAKWNNTLKQIASKLREQFGNNKTIIFKQSSGGDPEIVTHSFNCGGEFFYCNSTQLFNSTWFNSTWSTEGSNNTEGSDTITLPCRIKQIINMWQKVGKAMYAPPISGQIRCSSNITGLLLTRDGGNSNNESEIFRPGGGDMRDNWRSELYKYKVVKIEPLGVAPTKAKRRVVQREKRAVGIGALFLGFLGAAGSTMGAASMTLTVQARQLLSGIVQQQNNLLRAIEAQQHLLQLTVWGIKQLQARILAVERYLKDQQLLGIWGCSGKLICTTAVPWNASWSNKSLEQIWNHTTWMEWDREINNYTSLIHSLIEESQNQQEKNEQELLELDKWASLWNWFNITNWLWYIKLFIMIVGGLVGLRIVFAVLSIVNRVRQGYSPLSFQTHLPTPRGPDRPEGIEEEGGERDRDRSIRLVNGSLALIWDDLRSLCLFSYHRLRDLLLIVTRIVELLGRRGWEALKYWWNLLQYWSQELKNSAVSLLNATAIAVAEGTDRVIEVVQGACRAIRHIPRRIRQGLERILL

SEQ ID NO: 659 - protein, 189 aa, Human immunodeficiency virus 1
MPQTVSCNRCCCASIALSKLFCCCTIPDNNCLACTVSVIEAAPIVLPAAPKNPRNKAPIPTALFSLCTTLLFALVGATPNGSIFTTLYLYNSLLQLSLISPPPGLKISDSLLLLPPSLVNSSPVIFDEHLICPLMGGAYIAFPTFCHMFIICFILHGRVIVSLPSVLFDPSVLQVLLNQVLLNSCVELQ

SEQ ID NO: 660 - protein, 206 aa, Human immunodeficiency virus 1
MGGKWSKSSVIGWPTVRERMRRAEPAADRVGAASRDLEKHGAITSSNTAATNAACAWLEAQEEEEVGFPVTPQVPLRPMTYKAAVDLSHFLKEKGGLEGLIHSQRRQDILDLWIYHTQGYFPDWQNYTPGPGVRYPLTFGWCYKLVPVEPDKIEEANKGENTSLLHPVSLHGMDDPEREVLEWRFDSRLAFHHVARELHPEYFKNC

SEQ ID NO: 661-700 - skipped (40 entries)

SEQ ID NO: 701 - DNA, 420 bp, unidentified
  source 1..420: mol_type = unassigned DNA; note = Respiratory syncytial virus
atgggcagcaattcattgagtatgataaaagttagattgcaaaatttatttgacaatgatgaagtagcattgttaaaaataacctgctatactgacaaattgatacatttaactaatgctttggctaaggcagtgatacatacaatcaaattgaatggcattgtatttgtgcatgttattacaagtagtgatatttgccctaataataatattgtagtgaaatccaacttcacaacaatgccagtgttacaaaatggaggttatatatgggaaatgatggaattaacacactgctctcaacccaatggcctaatagatgacaattgtgaaatcaaattctccaaaaaactaagcgattcaacaatgaccaactatatgaatcaattatctgaattacttggatttgatctcaatccataa

SEQ ID NO: 702 - DNA, 375 bp, unidentified
  source 1..375: mol_type = unassigned DNA; note = Respiratory syncytial virus
atggacacaacacacaatggtactacaccacaaagactgatgatcacagacatgagaccattgtcacttgagactataataacatcactaaccagagacatcataacacacagatttatatacttgataaatcatgaatgtatagtgagaaaacttgatgaaagacaggccacatttacattcctggtcaactatgaaatgaaactattgcacaaagtgggaagcactaagtacaaaaaatatactgaatacaacacaaaatatggcacttttcctatgccaatatttatcaatcatgatgggttcttagaatgcattggcattaagcctacaaagcacactcccataatatacaagtatgatctcaatccatga

SEQ ID NO: 703 - DNA, 1176 bp, unidentified
  source 1..1176: mol_type = unassigned DNA; note = Respiratory syncytial virus
atggctcttagcaaagtcaagttgaacgatacactcaacaaagatcaacttctgtcatccagcaaatacaccatccaacggagcacaggagatagtattgatactcctaattatgatgtgcagaaacacatcaacaagttatgtggcatgttattaatcacagaagatgctaatcataaattcactggggtaataggtatgttatatgctatgtctagattaggaagagaagacaccataaaaatactcagagatgcgggatatcatgtaaaagcaaatggagtggatgtaacaacacatcgtcaagacattaatggaaaagaaatgaaatttgaagtgttaacattggcaagcttaacaactgaaattcaaatcaacattgagatagaatctaggaaatcctacaaaaaaatgctaaaagaaatgggagaggtggctccagaatacaggcatgactctcctgattgtggaatgataatattatgtatagcagcattagtaataaccaaattagcagcaggggatagatctggtcttactgctgtgattaggagagctaataatgttctaaaaaatgaaatgaaacgttataaaggcttactaccaaaggatatagccaacagcttctatgaagtgtttgaaaaatatcctcactttatagatgtttttgttcattttggtatagcacaatcttctaccagaggtggcagtagagttgaagggatttttgcaggattgtttatgaatgcctatggtgcagggcaagtgatgttacggtggggagtcttagcaaaatcagttaaaaatattatgctaggacatgctagtgtgcaagcagaaatggaacaagttgtggaagtttatgaatatgcccaaaaattgggtggagaagcaggattctaccatatattgaacaatccaaaagcatcattattatctttgactcaatttccccacttctccagtgtagtattgggcaatgctgctggcctaggcataatgggagaatacagaggtacaccaaggaatcaagatctatatgatgctgcaaaggcatatgctgaacaactcaaagaaaatggtgtgattaactacagtgtattagacttgacagcagaagaactagaggctatcaaacatcagcttaatccaaaagataatgatgtagagctttga

SEQ ID NO: 704 - DNA, 726 bp, unidentified
  source 1..726: mol_type = unassigned DNA; note = Respiratory syncytial virus
atggaaaagtttgctcctgaattccatggagaagacgcaaacaacagagccactaaattcctagaatcaataaagggcaaattcacatcacctaaagatcccaagaaaaaagatagtatcatatctgtcaactcaatagatatagaagtaaccaaagaaagccctataacttcaaattcaaccattataaaccctacaaatgagacagatgatactgcagggaacaagcccaattatcaaagaaaaccactagtgagtttcaaagaagaccctacgccaagtgataatcccttttcaaaactatacaaagaaaccatagaaacatttgataacaatgaagaagaatctagctattcatatgaagaaataaatgatcagacaaacgataatataacagcaagattagataggattgatgaaaaattaagtgaaatactaggaatgcttcacacactagtagtagcaagtgcaggacctacatctgctcgggatggtataagagatgccatggttggtttaagagaagaaatgatagaaaaaatcagaactgaagcattgatgaccaatgatagattagaagctatggcaagactcaggaatgaggaaagtgaaaagatggcaaaagacacatcagatgaagtgtctctcaatccaacatcagagaaattgaacaacctgttggaaggaaatgatagtgataatgatctatcacttgaagatttctga

SEQ ID NO: 705 - DNA, 771 bp, unidentified
  source 1..771: mol_type = unassigned DNA; note = Respiratory syncytial virus
atggaaacatacgtgaacaaacttcacgaaggctccacatacacagctgctgttcaatacaatgtcctagaaaaagacgatgaccctgcatcacttacaatatgggtgcccatgttccaatcatccatgccagcagatttacttataaaagaactagctaatgtcaacatactagtgaaacaaatatccacacccaaaggaccttcattaagagtcatgataaactcaagaagtgcagtgctagcacaaatgcccagcaaattcactatatgtgccaatgtgtccttggatgaaagaagcaagctggcatatgatgtaaccacaccctgcgaaatcaaggcatgtagtctaacatgcctaaaatcaaaaaatatgttaactacagttaaagatctcactatgaaaacactcaacccaacacatgacatcattgctttatgtgaatttgaaaatatagtaacatcaaaaaaagtcataataccaacatacttaagatccatcagtgtcagaaataaagatctgaacacacttgaaaatataacaaccaccgaattcaaaaatgccatcacaaatgcaaaaatcatcccttactcaggattactgttagtcatcacagtgactgacaacaaaggagcatttaaatacataaagccacaaagtcaattcatagtagatcttggagcttacctagaaaaagaaagtatatattatgttacaacaaattggaagcacacagctacacgatttgcaatcaaacccatggaagattaa

SEQ ID NO: 706 - DNA, 195 bp, unidentified
  source 1..195: mol_type = unassigned DNA; note = Respiratory syncytial virus
atggaaaatacatccataacaatagaattctcaagcaaattctggccttactttacactaatacatatgatcacaacaataatctctttgctaatcataatctccatcatgattgcaatactaaacaaactctgtgaatataacgtattccataacaaaacctttgagctaccaagagctcgagtcaatacatag

SEQ ID NO: 707 - DNA, 897 bp, unidentified
  source 1..897: mol_type = unassigned DNA; note = Respiratory syncytial virus
atgtccaaaaccaaggaccaacgcaccgccaagacactagaaaagacctgggacactctcaatcatctattattcatatcatcgtgcttatacaagttaaatcttaaatctatagcacaaatcacattatccattctggcaatgataatctcaacttcacttataattgtagctatcatattcatagcctcagcaaacaacaaagtcacactaacaactgcaatcatacaagatgcaacaagccagatcaagaacacaaccccaacatacctgacccagaatccccagcttggaatcagcttcttcaatctgtctggaactatatcacaaaccaccgccatactagctttaacaacaccaagtgtcgagtcaatcctgcaatctacaacagtcaagaccaaaaacacaacaacaacccaaatacaacccagcaagcccaccacaaaacaacgccaaaacaaaccaccaaacaaacccaatgatgattttcactttgaagtgttcaactttgtaccctgcagcatatgcagcaacaatccaacttgctgggccatctgcaaaagaataccaagcaaaaaacctggaaagaaaaccaccaccaagcccacgaaaaaaccaaccatcaagacaaccaaaaaagatctcaaacctcaaaccacaaaaccaaaggaagcacccaccaccaagcccacagataagccaaccatcaacatcaccaaaccaaacatcagaactacactgctcaccaacagtaccacaggaaatccagaacacacaagtcaagaggaaaccctccattcaacctcctccgaaggcaacacaagcccttcacaaatctatacaacatccgagtacctatcacaacctccatctccatccaacataacagaccagtag

SEQ ID NO: 708 - DNA, 1725 bp, unidentified
  source 1..1725: mol_type = unassigned DNA; note = Respiratory syncytial virus
atggagttgccaatcctcaaaacaaatgcaattaccacaatccttgctgcagtcacactctgtttcgcttccagtcaaaacatcactgaagaattttatcaatcaacatgcagtgcagttagcaaaggctatcttagtgctttaagaactggttggtatactagtgttataactatagaattaagtaatatcaaggaaaataagtgtaatggaacagatgctaaggtaaaattgataaaacaagaattagataaatataaaaatgctgtaacagaattgcagttgctcatgcaaagcacaccagcagccaacaatcgagccagaagagaactaccaaggtttatgaattatacactcaacaataccaaaaataacaatgtaacattaagcaagaaaaggaaaagaagatttcttggctttttgttaggtgttggatctgcaatcgccagtggcattgctgtatctaaagtcctgcacctagaaggggaagtgaacaaaatcaaaaatgctctactatccacaaacaaggctgtagtcagcttatcaaatggagttagtgtcttaaccagcaaagtgttagacctcaaaaactatatagataaacagttgttacccattgtgaacaagcaaagctgcagcatatcaaacattgaaactgtgatagaattccaacaaaagaacaacagactactagagattaccagggaatttagtgttaatgcaggtgtaactacacctgtaagcacttatatgttaacaaatagtgaattattatcattaatcaatgatatgcctataacaaatgatcagaaaaagttaatgtccaacaatgttcaaatagttagacagcaaagttactctatcatgtccataataaaggaggaagtcttagcatatgtagttcaattaccactatatggtgtaatagatacaccttgttggaaactacacacatcccctctatgcacaaccaacacaaaggaagggtccaacatctgtttaacaagaaccgacagaggatggtactgtgacaatgcaggatcagtgtctttcttcccacaagctgaaacatgcaaagttcaatcgaatcgagtattttgtgacacaatgaacagtctaacattaccaagtgaagtaaatctctgcaacattgacatattcaaccctaaatatgattgcaaaattatgacttcaaaaacagatgtgagcagctccgttatcacatctctaggagccattgtgtcatgctatggcaaaactaaatgtacagcatccaataaaaatcgtggaatcataaagacattttctaacgggtgtgattatgtatcaaataagggggtggacactgtatctgtaggtaatacattatattatgtaaataagcaagaaggaaaaagcctctatgtaaaaggtgaaccaataataaatttctatgacccattagtgttcccttctgatgaatttgatgcatcaatatctcaagtcaatgagaagattaaccagagcctagcatttattcgtaaatccgatgaattattacataatgtaaatgttggtaaatccaccacaaatatcatgataactactataattatagtgattatagtaatattgttattattaattgcagttgggctgttcctatactgcaaggccagaagcacaccagtcacactaagcaaggatcaactgagtggtataaataatattgcatttagtaactga

SEQ ID NO: 709 - DNA, 585 bp, unidentified
  source 1..585: mol_type = unassigned DNA; note = Respiratory syncytial virus
atgtcacgaaggaatccttgcaaatttgaaattcgaggtcattgcttgaatggtaagaggtgtcattttagtcataattattttgaatggccaccccatgcactgcttgtaagacaaaactttatgttaaacagaatacttaagtctatggataaaagcatagatactttatcagaaataagtggagctgcagagttggacagaactgaagagtatgccctcggtgtagttggagtgctagagagttatataggatcaataaataatataactaaacaatcagcatgtgttgccatgagcaaactcctcactgaactcaacagtgatgacatcaaaaaactaagagataatgaagagccaaattcacctaagataagagtgtacaatactgtcatatcatatattgaaagcaacaggaaaaacaataaacaaactatccatctgttaaaaagattgccagcagacgtattgaagaaaaccatcaaaaacacattggatatccacaagagcataaccatcaacaacccaaaagaatcaactgttaatgatacaaatgaccatgccaaaaataatgatactacctga

SEQ ID NO: 710 - DNA, 267 bp, unidentified
  source 1..267: mol_type = unassigned DNA; note = Respiratory syncytial virus
atgccaaaaataatgatactacctgacaaatatccttgtagtataaattccatactaataacaagtagttgtagagttactatgtataatcaaaagaacacactatatttcaatcaaaacaaccaaaataaccatacatactcaccaaatcaaccattcaatgaaatccattggacctctcaagacttgattgatgcaattcaaaattttctacaacatctaggtattactgatgatatatatacaatatatatattagtgtcataa

SEQ ID NO: 711 - DNA, 6498 bp, unidentified
  source 1..6498: mol_type = unassigned DNA; note = Respiratory syncytial virus
atggatcccattattaatggaaattctgctaatgtttatctaaccgatagttatttaaaaggtgttatttctttctcagaatgtaatgctttaggaagttacatattcaatggtccttatctcaaaaatgattacaccaacttaattagtagacaaaatccattaatagaacacataaatctaaagaaattaaatataacacagtctttaatatctaagtatcataaaggtgaaataaaaatagaagaacctacttattttcagtcattacttatgacatacaagagtatgacctcgtcagaacagattactaccactaatttacttaaaaagataataagaagagcaatagaaattagtgatgtcaaagtctatgctatattgaataaactggggcttaaagaaaaagacaagattaaatccaacaatggacaagatgaaaacaactcagttattacaaccataatcaaagatgatatacttttagctgttaaggataatcaatctcatcttaaagcaggcaaaaatcactctacaaaacaaaaagatactatcaaaacaacactcttgaaaaaattaatgtgttcgatgcaacatcctccatcatggttaatacattggtttaatttatacacaaaattaaacaacatattaacacagtatcgatcaaatgaggtaaaaaaccatggttttatattgatagataatcaaactctcaatggattccaatttattttgaatcaatatggttgtatagtttatcataaggaactcaaaagaattactgtgacaacctataatcaattcttgacatggaaagatattagccttagtagattaaatgtttgtttaattacatggattagtaactgtttgaacacattaaacaaaagcttaggcttaagatgcggattcaataatgttatcttgacacaactattcctttatggagattgtatattaaaactatttcacaatgaagggttctacataataaaagaggtagagggttttattatgtctctaattttaaacataacagaagaagatcaattcagaaaacggttttataatagtatgctcaacaacatcacagatgctgctaataaagctcagaaaaatctgttatcaagagtatgtcatacattattagataagacagtgtccgataatataataaatggcagatggataattctattaagtaagtttcttaaattaattaagcttgcaggtgacaacaaccttaacaatctgagtgaattatattttttattcagaatatttggacacccaatggtagatgaaagacaagccatggatgctgttaaagttaattgcaacgagaccaaattttacttgttaagcagtttgagtatgttaagaggtgcctttatatatagaattataaaagggtttgtaaataattacaacagatggcctactttaaggaatgctattgttttacccttaagatggttaacttactataaactaaacacttatccttccttattggaacttacagaaagagatttgattgttttatcaggactacgtttctatcgtgagtttcggttgcctaaaaaagtggatcttgaaatgatcataaatgataaggctatatcacctcctaaaaatttgatatggactagtttccctagaaattatatgccgtcacacatacaaaattatatagaacatgaaaaattaaaattttccgagagtgataaatcaagaagagtattagagtactatttaagagataacaaattcaatgaatgtgatttatataactgtgtagttaatcaaagctatcttaacaaccctaatcatgtggtatcattgactggcaaagaaagagaactcagtgtaggtagaatgtttgcaatgcaaccaggaatgttcaggcaagttcaaatattagcagagaaaatgatagctgaaaacattttacaattctttcctgaaagtcttacaagatatggtgatctagaattacagaaaatattagaattgaaagcgggaataagtaacaaatcaaatcgttacaatgacaattacaacaattacatcagtaagtgctctatcatcacagatctcagcaaattcaatcaagcattccggtatgaaacatcatgtatttgtagtgatgtattagatgaactgcatggtgtacaatctctattttcctggttacatttaactattcctcatgtcacaataatatgcacatataggcatgcacccccctatataagagatcacattgtagatcttaacaatgtagatgaacaaagtggattatatagatatcatatgggtggtatcgaagggtggtgtcaaaaactatggaccatagaagctatatcactattggatctaatatctctcaaggggaaattctcaattactgccttaattaatggtgacaatcaatcaatagatataagcaaaccagtcagactcatggaaggtcaaactcatgctcaagcagattatttgctagcattaaatagtcttaaattgctgtataaagagtatgcaggcataggccacaaattaaaaggaactgagacttatatatcaagagatatgcaatttatgagtaaaacaattcaacataacggtgtatattacccagctagtataaagaaagtcctaagagtgggaccatggataaacactatacttgatgatttcaaagtgagtctagaatctataggtagtttgacacaagaattagaatatagaggtgaaagtctattatgcagtttaatatttagaaatgtgtggttatataatcaaattgctttacaactaaaaaatcatgcattatgtaacaataaattatatttggacatattaaaggttctgaaacacttaaaaaccttttttaatcttgataatattgatacagcattaacattgtatatgaatttgcccatgctatttggtggtggtgatcccaacttgttatatcgaagtttctatagaagaactcctgatttcctcacagaggctatagttcactctgtgttcatacttagttattatacaaaccatgatttaaaggataaacttcaagatctgtcagacgatagattgaataagttcttaacatgcataatcacgtttgacaaaaaccctaatgctgaattcgtaacattgatgagagatcctcaagctttagggtctgagaggcaagctaaaattactagcgaaatcaatagactggcagttactgaggttttgagcacagctccaaacaaaatattctccaaaagtgcacaacactataccactacagagatagatctaaatgatattatgcaaaatatagaacctacatatcctcatgggctaagagttgtttatgaaagtttacccttttataaagcagagaaaatagtaaatcttatatccggtacaaaatctataactaacatactggaaaagacttctgccatagacttaacagatattgatagagccactgagatgatgaggaaaaacataactttgcttataaggatatttccattagattgtaacagagataaaagagaaatattgagtatggaaaacctaagtattactgaattaagcaaatatgttagagaaagatcttggtctttatccaatatagttggtgttacatcacccagtatcatgtatacaatggacatcaaatatacaacaagcactatagctagtggcataatcatagagaaatataatgtcaacagtttaacacgtggtgagagaggacccactaaaccatgggttggttcatctacacaagagaaaaaaacaatgccagtttacaatagacaagttttaaccaaaaaacagagagatcaaattgatctattagcaaaattggactgggtgtatgcatctatagataacaaggatgaattcatggaagaactcagcataggaactcttgggttaacatatgagaaagccaaaaaattatttccacaatatttaagtgttaactatttgcatcgccttacagtcagtagtagaccatgtgaattccctgcatcaataccagcttatagaactacaaattatcactttgatactagccctattaatcgcatattaacagaaaagtatggtgatgaagatattgatatagtattccaaaactgtataagttttggccttagcttaatgtcagtagtagagcaatttaccaatgtatgtcctaacagaattattctcatacccaagcttaatgagatacatttgatgaaacctcccatattcacaggtgatgttgatattcacaagttaaaacaagtgatccaaaaacagcatatgtttttaccagacaaaataagtttgactcaatatgtggaattatttttaagtaataaaacactcaaatctggatctcatgttaattctaatttaatattggcacataagatatctgactattttcataatacttacattttaagtactaatttagctggacattggattctgattatacaacttatgaaagattctaaaggtatttttgaaaaagattggggagagggatatataactgatcatatgttcattaatttgaaagttttcttcaatgcttataagacctatctcttgtgttttcataaaggttacggcagagcaaagctagagtgcgatatgaatacttcagatctcctatgtgtattggaattaatagacagtagttattggaagtctatgtctaaggtatttttagaacaaaaagttatcaaatacattctcagccaggatgcaagtttacatagagtaaaaggatgtcatagcttcaaactatggtttcttaaacgtcttaatgtagcagaattcacagtttgcccttgggttgttaacatagattatcatccaacacatatgaaagcaatattaacttatatagatcttgttagaatgggattgataaatatagatagaatatacattaaaaataaacacaaattcaatgatgaattttatacttctaatctcttttacattaattataacttctcagataatactcatctattaactaaacatataaggattgctaattctgaattagaaaataattacaacaaattatatcatcctacacctgaaactctagaaaatatactaaccaatccggttaaatgtgatgacaaaaagacactgaatgactattgtataggtaaaaatgttgactcaataatgttaccattgttatctaataagaagcttattaaatcgtctacaatgattagaaccaattacagcaaacaagatttgtataatttatttcctacggttgtgattgataaaattatagatcattcaggtaatacagccaaatctaaccaactttacactactacttctcatcaaatatctttagtacacaatagcacatcactttattgcatgcttccttggcatcatattaatagattcaattttgtgtttagttctacaggttgtaaaattagtatagagtatattttaaaagaccttaaaattaaagatcctaattgtatagcattcataggtgaaggagcagggaatttattgttgcgtacagtagtggaacttcatcctgatataaaatatatttacagaagtctgaaagattgcaatgatcatagtttacctattgagtttttaaggctgtacaatgggcatatcaacattgattatggtgaaaatttgaccattcccgctacagatgcaaccaacaacattcattggtcttatttgcatataaagtttgctgaacctatcagtctttttgtttgtgatgctgaattgcctgtaacagtcaactggagtaaaattataatagagtggagcaagcatgtaagaaaatgcaagtactgttcctcagttaataaatgtacgttaatagtaaaatatcatgctcaagatgatatcgatttcaaattagacaacataactatattaaaaacttatgtatgcttaggcagtaagttaaaggggtctgaagtttacttagtccttacaataggtcctgcaaatgtgttcccagtatttaatgtagtacaaaatgctaaattgatactatcaagaaccaaaaatttcatcatgcctaagaaggctgataaagagtctattgatgcaaatattaaaagtttgataccctttctttgttaccctataacaaaaaaaggaattaatactgcattatcaaaactaaagagtgttgttagtggagatatactatcatattctatagctggacgtaatgaagttttcagcaataaacttataaatcataagcatatgaacatcttaaagtggttcaaccatgttttaaatttcagatcaacagaacttaactataatcatttatatatggtagaatccacatatccttatctaagtgaattgttaaacagcttgacaactaatgaacttaaaaaactgattaaaatcacaggtagtttgttatacaactttcataatgaataa

SEQ ID NO: 712-750 - skipped (39 entries)

SEQ ID NO: 751 - protein, 139 aa, unidentified
  source 1..139: note = Respiratory syncytial virus
MGSNSLSMIKVRLQNLFDNDEVALLKITCYTDKLIHLTNALAKAVIHTIKLNGIVFVHVITSSDICPNNNIVVKSNFTTMPVLQNGGYIWEMMELTHCSQPNGLIDDNCEIKFSKKLSDSTMTNYMNQLSELLGFDLNP

SEQ ID NO: 752 - protein, 124 aa, unidentified
  source 1..124: note = Respiratory syncytial virus
MDTTHNGTTPQRLMITDMRPLSLETIITSLTRDIITHRFIYLINHECIVRKLDERQATFTFLVNYEMKLLHKVGSTKYKKYTEYNTKYGTFPMPIFINHDGFLECIGIKPTKHTPIIYKYDLNP

SEQ ID NO: 753 - protein, 391 aa, unidentified
  source 1..391: note = Respiratory syncytial virus
MALSKVKLNDTLNKDQLLSSSKYTIQRSTGDSIDTPNYDVQKHINKLCGMLLITEDANHKFTGVIGMLYAMSRLGREDTIKILRDAGYHVKANGVDVTTHRQDINGKEMKFEVLTLASLTTEIQINIEIESRKSYKKMLKEMGEVAPEYRHDSPDCGMIILCIAALVITKLAAGDRSGLTAVIRRANNVLKNEMKRYKGLLPKDIANSFYEVFEKYPHFIDVFVHFGIAQSSTRGGSRVEGIFAGLFMNAYGAGQVMLRWGVLAKSVKNIMLGHASVQAEMEQVVEVYEYAQKLGGEAGFYHILNNPKASLLSLTQFPHFSSVVLGNAAGLGIMGEYRGTPRNQDLYDAAKAYAEQLKENGVINYSVLDLTAEELEAIKHQLNPKDNDVEL

SEQ ID NO: 754 - protein, 241 aa, unidentified
  source 1..241: note = Respiratory syncytial virus
MEKFAPEFHGEDANNRATKFLESIKGKFTSPKDPKKKDSIISVNSIDIEVTKESPITSNSTIINPTNETDDTAGNKPNYQRKPLVSFKEDPTPSDNPFSKLYKETIETFDNNEEESSYSYEEINDQTNDNITARLDRIDEKLSEILGMLHTLVVASAGPTSARDGIRDAMVGLREEMIEKIRTEALMTNDRLEAMARLRNEESEKMAKDTSDEVSLNPTSEKLNNLLEGNDSDNDLSLEDF

SEQ ID NO: 755 - protein, 256 aa, unidentified
  source 1..256: note = Respiratory syncytial virus
METYVNKLHEGSTYTAAVQYNVLEKDDDPASLTIWVPMFQSSMPADLLIKELANVNILVKQISTPKGPSLRVMINSRSAVLAQMPSKFTICANVSLDERSKLAYDVTTPCEIKACSLTCLKSKNMLTTVKDLTMKTLNPTHDIIALCEFENIVTSKKVIIPTYLRSISVRNKDLNTLENITTTEFKNAITNAKIIPYSGLLLVITVTDNKGAFKYIKPQSQFIVDLGAYLEKESIYYVTTNWKHTATRFAIKPMED

SEQ ID NO: 756 - protein, 64 aa, unidentified
  source 1..64: note = Respiratory syncytial virus
MENTSITIEFSSKFWPYFTLIHMITTIISLLIIISIMIAILNKLCEYNVFHNKTFELPRARVNT

SEQ ID NO: 757 - protein, 298 aa, unidentified
  source 1..298: note = Respiratory syncytial virus
MSKTKDQRTAKTLEKTWDTLNHLLFISSCLYKLNLKSIAQITLSILAMIISTSLIIVAIIFIASANNKVTLTTAIIQDATSQIKNTTPTYLTQNPQLGISFFNLSGTISQTTAILALTTPSVESILQSTTVKTKNTTTTQIQPSKPTTKQRQNKPPNKPNDDFHFEVFNFVPCSICSNNPTCWAICKRIPSKKPGKKTTTKPTKKPTIKTTKKDLKPQTTKPKEAPTTKPTDKPTINITKPNIRTTLLTNSTTGNPEHTSQEETLHSTSSEGNTSPSQIYTTSEYLSQPPSPSNITDQ

SEQ ID NO: 758 - protein, 574 aa, unidentified
  source 1..574: note = Respiratory syncytial virus
MELPILKTNAITTILAAVTLCFASSQNITEEFYQSTCSAVSKGYLSALRTGWYTSVITIELSNIKENKCNGTDAKVKLIKQELDKYKNAVTELQLLMQSTPAANNRARRELPRFMNYTLNNTKNNNVTLSKKRKRRFLGFLLGVGSAIASGIAVSKVLHLEGEVNKIKNALLSTNKAVVSLSNGVSVLTSKVLDLKNYIDKQLLPIVNKQSCSISNIETVIEFQQKNNRLLEITREFSVNAGVTTPVSTYMLTNSELLSLINDMPITNDQKKLMSNNVQIVRQQSYSIMSIIKEEVLAYVVQLPLYGVIDTPCWKLHTSPLCTTNTKEGSNICLTRTDRGWYCDNAGSVSFFPQAETCKVQSNRVFCDTMNSLTLPSEVNLCNIDIFNPKYDCKIMTSKTDVSSSVITSLGAIVSCYGKTKCTASNKNRGIIKTFSNGCDYVSNKGVDTVSVGNTLYYVNKQEGKSLYVKGEPIINFYDPLVFPSDEFDASISQVNEKINQSLAFIRKSDELLHNVNVGKSTTNIMITTIIIVIIVILLLLIAVGLFLYCKARSTPVTLSKDQLSGINNIAFSN

SEQ ID NO: 759 - protein, 194 aa, unidentified
  source 1..194: note = Respiratory syncytial virus
MSRRNPCKFEIRGHCLNGKRCHFSHNYFEWPPHALLVRQNFMLNRILKSMDKSIDTLSEISGAAELDRTEEYALGVVGVLESYIGSINNITKQSACVAMSKLLTELNSDDIKKLRDNEEPNSPKIRVYNTVISYIESNRKNNKQTIHLLKRLPADVLKKTIKNTLDIHKSITINNPKESTVNDTNDHAKNNDTT

SEQ ID NO: 760 - protein, 88 aa, unidentified
  source 1..88: note = Respiratory syncytial virus
MPKIMILPDKYPCSINSILITSSCRVTMYNQKNTLYFNQNNQNNHTYSPNQPFNEIHWTSQDLIDAIQNFLQHLGITDDIYTIYILVS

SEQ ID NO: 761 - protein, 2165 aa, unidentified
  source 1..2165: note = Respiratory syncytial virus
MDPIINGNSANVYLTDSYLKGVISFSECNALGSYIFNGPYLKNDYTNLISRQNPLIEHINLKKLNITQSLISKYHKGEIKIEEPTYFQSLLMTYKSMTSSEQITTTNLLKKIIRRAIEISDVKVYAILNKLGLKEKDKIKSNNGQDENNSVITTIIKDDILLAVKDNQSHLKAGKNHSTKQKDTIKTTLLKKLMCSMQHPPSWLIHWFNLYTKLNNILTQYRSNEVKNHGFILIDNQTLNGFQFILNQYGCIVYHKELKRITVTTYNQFLTWKDISLSRLNVCLITWISNCLNTLNKSLGLRCGFNNVILTQLFLYGDCILKLFHNEGFYIIKEVEGFIMSLILNITEEDQFRKRFYNSMLNNITDAANKAQKNLLSRVCHTLLDKTVSDNIINGRWIILLSKFLKLIKLAGDNNLNNLSELYFLFRIFGHPMVDERQAMDAVKVNCNETKFYLLSSLSMLRGAFIYRIIKGFVNNYNRWPTLRNAIVLPLRWLTYYKLNTYPSLLELTERDLIVLSGLRFYREFRLPKKVDLEMIINDKAISPPKNLIWTSFPRNYMPSHIQNYIEHEKLKFSESDKSRRVLEYYLRDNKFNECDLYNCVVNQSYLNNPNHVVSLTGKERELSVGRMFAMQPGMFRQVQILAEKMIAENILQFFPESLTRYGDLELQKILELKAGISNKSNRYNDNYNNYISKCSIITDLSKFNQAFRYETSCICSDVLDELHGVQSLFSWLHLTIPHVTIICTYRHAPPYIRDHIVDLNNVDEQSGLYRYHMGGIEGWCQKLWTIEAISLLDLISLKGKFSITALINGDNQSIDISKPVRLMEGQTHAQADYLLALNSLKLLYKEYAGIGHKLKGTETYISRDMQFMSKTIQHNGVYYPASIKKVLRVGPWINTILDDFKVSLESIGSLTQELEYRGESLLCSLIFRNVWLYNQIALQLKNHALCNNKLYLDILKVLKHLKTFFNLDNIDTALTLYMNLPMLFGGGDPNLLYRSFYRRTPDFLTEAIVHSVFILSYYTNHDLKDKLQDLSDDRLNKFLTCIITFDKNPNAEFVTLMRDPQALGSERQAKITSEINRLAVTEVLSTAPNKIFSKSAQHYTTTEIDLNDIMQNIEPTYPHGLRVVYESLPFYKAEKIVNLISGTKSITNILEKTSAIDLTDIDRATEMMRKNITLLIRIFPLDCNRDKREILSMENLSITELSKYVRERSWSLSNIVGVTSPSIMYTMDIKYTTSTIASGIIIEKYNVNSLTRGERGPTKPWVGSSTQEKKTMPVYNRQVLTKKQRDQIDLLAKLDWVYASIDNKDEFMEELSIGTLGLTYEKAKKLFPQYLSVNYLHRLTVSSRPCEFPASIPAYRTTNYHFDTSPINRILTEKYGDEDIDIVFQNCISFGLSLMSVVEQFTNVCPNRIILIPKLNEIHLMKPPIFTGDVDIHKLKQVIQKQHMFLPDKISLTQYVELFLSNKTLKSGSHVNSNLILAHKISDYFHNTYILSTNLAGHWILIIQLMKDSKGIFEKDWGEGYITDHMFINLKVFFNAYKTYLLCFHKGYGRAKLECDMNTSDLLCVLELIDSSYWKSMSKVFLEQKVIKYILSQDASLHRVKGCHSFKLWFLKRLNVAEFTVCPWVVNIDYHPTHMKAILTYIDLVRMGLINIDRIYIKNKHKFNDEFYTSNLFYINYNFSDNTHLLTKHIRIANSELENNYNKLYHPTPETLENILTNPVKCDDKKTLNDYCIGKNVDSIMLPLLSNKKLIKSSTMIRTNYSKQDLYNLFPTVVIDKIIDHSGNTAKSNQLYTTTSHQISLVHNSTSLYCMLPWHHINRFNFVFSSTGCKISIEYILKDLKIKDPNCIAFIGEGAGNLLLRTVVELHPDIKYIYRSLKDCNDHSLPIEFLRLYNGHINIDYGENLTIPATDATNNIHWSYLHIKFAEPISLFVCDAELPVTVNWSKIIIEWSKHVRKCKYCSSVNKCTLIVKYHAQDDIDFKLDNITILKTYVCLGSKLKGSEVYLVLTIGPANVFPVFNVVQNAKLILSRTKNFIMPKKADKESIDANIKSLIPFLCYPITKKGINTALSKLKSVVSGDILSYSIAGRNEVFSNKLINHKHMNILKWFNHVLNFRSTELNYNHLYMVESTYPYLSELLNSLTTNELKKLIKITGSLLYNFHNE

SEQ ID NO: 762-800 - skipped (39 entries)

SEQ ID NO: 801 - DNA, 2220 bp, Zaire ebolavirus
  source 1..2220: mol_type = unassigned DNA
atggattctcgtcctcagaaaatctggatggcgccgagtctcactgaatctgacatggattaccacaagatcttgacagcaggtctgtccgttcaacaggggattgttcggcaaagagtcatcccagtgtatcaagtaaacaatcttgaagaaatttgccaacttatcatacaggcctttgaagcaggtgttgattttcaagagagtgcggacagtttccttctcatgctttgtcttcatcatgcgtaccagggagattacaaacttttcttggaaagtggcgcagtcaagtatttggaagggcacgggttccgttttgaagtcaagaagcgtgatggagtgaagcgccttgaggaattgctgccagcagtatctagtggaaaaaacattaagagaacacttgctgccatgccggaagaggagacaactgaagctaatgccggtcagtttctctcctttgcaagtctattccttccgaaattggtagtaggagaaaaggcttgccttgagaaggttcaaaggcaaattcaagtacatgcagagcaaggactgatacaatatccaacagcttggcaatcagtaggacacatgatggtgattttccgtttgatgcgaacaaattttctgatcaaatttctcctaatacaccaagggatgcacatggttgccgggcatgatgccaacgatgctgtgatttcaaattcagtggctcaagctcgtttttcaggcttattgattgtcaaaacagtacttgatcatatcctacaaaagacagaacgaggagttcgtctccatcctcttgcaaggaccgccaaggtaaaaaatgaggtgaactcctttaaggctgcactcagctccctggccaagcatggagagtatgctcctttcgcccgacttttgaacctttctggagtaaataatcttgagcatggtcttttccctcaactatcggcaattgcactcggagtcgccacagcacacgggagtaccctcgcaggagtaaatgttggagaacagtatcaacaactcagagaggctgccactgaggctgagaagcaactccaacaatatgcagagtctcgcgaacttgaccatcttggacttgatgatcaggaaaagaaaattcttatgaacttccatcagaaaaagaacgaaatcagcttccagcaaacaaacgctatggtaactctaagaaaagagcgcctggccaagctgacagaagctatcactgctgcgtcactgcccaaaacaagtggacattacgatgatgatgacgacattccctttccaggacccatcaatgatgacgacaatcctggccatcaagatgatgatccgactgactcacaggatacgaccattcccgatgtggtggttgatcccgatgatggaagctacggcgaataccagagttactcggaaaacggcatgaatgcaccagatgacttggtcctattcgatctagacgaggacgacgaggacactaagccagtgcctaatagatcgaccaagggtggacaacagaagaacagtcaaaagggccagcatatagagggcagacagacacaatccaggccaattcaaaatgtcccaggccctcacagaacaatccaccacgccagtgcgccactcacggacaatgacagaagaaatgaaccctccggctcaaccagccctcgcatgctgacaccaattaacgaagaggcagacccactggacgatgccgacgacgagacgtctagccttccgcccttggagtcagatgatgaagagcaggacagggacggaacttccaaccgcacacccactgtcgccccaccggctcccgtatacagagatcactctgaaaagaaagaactcccgcaagacgagcaacaagatcaggaccacactcaagaggccaggaaccaggacagtgacaacacccagtcagaacactcttttgaggagatgtatcgccacattctaagatcacaggggccatttgatgctgttttgtattatcatatgatgaaggatgagcctgtagttttcagtaccagtgatggcaaagagtacacgtatccagactcccttgaagaggaatatccaccatggctcactgaaaaagaggctatgaatgaagagaatagatttgttacattggatggtcaacaattttattggccggtgatgaatcacaagaataaattcatggcaatcctgcaacatcatcagtga

SEQ ID NO: 802 - DNA, 1023 bp, Zaire ebolavirus
  source 1..1023: mol_type = unassigned DNA
atgacaactagaacaaagggcaggggccatactgcggccacgactcaaaacgacagaatgccaggccctgagctttcgggctggatctctgagcagctaatgaccggaagaattcctgtaagcgacatcttctgtgatattgagaacaatccaggattatgctacgcatcccaaatgcaacaaacgaagccaaacccgaagacgcgcaacagtcaaacccaaacggacccaatttgcaatcatagttttgaggaggtagtacaaacattggcttcattggctactgttgtgcaacaacaaaccatcgcatcagaatcattagaacaacgcattacgagtcttgagaatggtctaaagccagtttatgatatggcaaaaacaatctcctcattgaacagggtttgtgctgagatggttgcaaaatatgatcttctggtgatgacaaccggtcgggcaacagcaaccgctgcggcaactgaggcttattgggccgaacatggtcaaccaccacctggaccatcactttatgaagaaagtgcgattcggggtaagattgaatctagagatgagaccgtccctcaaagtgttagggaggcattcaacaatctaaacagtaccacttcactaactgaggaaaattttgggaaacctgacatttcggcaaaggatttgagaaacattatgtatgatcacttgcctggttttggaactgctttccaccaattagtacaagtgatttgtaaattgggaaaagatagcaactcattggacatcattcatgctgagttccaggccagcctggctgaaggagactctcctcaatgtgccctaattcaaattacaaaaagagttccaatcttccaagatgctgctccacctgtcatccacatccgctctcgaggtgacattccccgagcttgccagaaaagcttgcgtccagtcccaccatcgcccaagattgatcgaggttgggtatgtgtttttcagcttcaagatggtaaaacacttggactcaaaatttga

SEQ ID NO: 803 - DNA, 981 bp, Zaire ebolavirus
  source 1..981: mol_type = unassigned DNA
atgaggcgggttatattgcctactgctcctcctgaatatatggaggccatataccctgtcaggtcaaattcaacaattgctagaggtggcaacagcaatacaggcttcctgacaccggagtcagtcaatggggacactccatcgaatccactcaggccaattgccgatgacaccatcgaccatgccagccacacaccaggcagtgtgtcatcagcattcatccttgaagctatggtgaatgtcatatcgggccccaaagtgctaatgaagcaaattccaatttggcttcctctaggtgtcgctgatcaaaagacctacagctttgactcaactacggccgccatcatgcttgcttcatacactatcacccatttcggcaaggcaaccaatccacttgtcagagtcaatcggctgggtcctggaatcccggatcatcccctcaggctcctgcgaattggaaaccaggctttcctccaggagttcgttcttccgccagtccaactaccccagtatttcacctttgatttgacagcactcaaactgatcacccaaccactgcctgctgcaacatggaccgatgacactccaacaggatcaaatggagcgttgcgtccaggaatttcatttcatccaaaacttcgccccattcttttacccaacaaaagtgggaagaaggggaacagtgccgatctaacatctccggagaaaatccaagcaataatgacttcactccaggactttaagatcgttccaattgatccaaccaaaaatatcatgggaatcgaagtgccagaaactctggtccacaagctgaccggtaagaaggtgacttctaaaaatggacaaccaatcatccctgttcttttgccaaagtacattgggttggacccggtggctccaggagacctcaccatggtaatcacacaggattgtgacacgtgtcattctcctgcaagtcttccagctgtgattgagaagtaa

SEQ ID NO: 804 - DNA, 2031 bp, Zaire ebolavirus
  source 1..2031: mol_type = unassigned DNA
atgggcgttacaggaatattgcagttacctcgtgatcgattcaagaggacatcattctttctttgggtaattatccttttccaaagaacattttccatcccacttggagtcatccacaatagcacattacaggttagtgatgtcgacaaactagtttgtcgtgacaaactgtcatccacaaatcaattgagatcagttggactgaatctcgaagggaatggagtggcaactgacgtgccatctgcaactaaaagatggggcttcaggtccggtgtcccaccaaaggtggtcaattatgaagctggtgaatgggctgaaaactgctacaatcttgaaatcaaaaaacctgacgggagtgagtgtctaccagcagcgccagacgggattcggggcttcccccggtgccggtatgtgcacaaagtatcaggaacgggaccgtgtgccggagactttgccttccataaagagggtgctttcttcctgtatgatcgacttgcttccacagttatctaccgaggaacgactttcgctgaaggtgtcgttgcatttctgatactgccccaagctaagaaggacttcttcagctcacaccccttgagagagccggtcaatgcaacggaggacccgtctagtggctactattctaccacaattagatatcaggctaccggttttggaaccaatgagacagagtacttgttcgaggttgacaatttgacctacgtccaacttgaatcaagattcacaccacagtttctgctccagctgaatgagacaatatatacaagtgggaaaaggagcaataccacgggaaaactaatttggaaggtcaaccccgaaattgatacaacaatcggggagtgggccttctgggaaactaaaaaaaacctcactagaaaaattcgcagtgaagagttgtctttcacagttgtatcaaacggagccaaaaacatcagtggtcagagtccggcgcgaacttcttccgacccagggaccaacacaacaactgaagaccacaaaatcatggcttcagaaaattcctctgcaatggttcaagtgcacagtcaaggaagggaagctgcagtgtcgcatctaacaacccttgccacaatctccacgagtccccaatccctcacaaccaaaccaggtccggacaacagcacccataatacacccgtgtataaacttgacatctctgaggcaactcaagttgaacaacatcaccgcagaacagacaacgacagcacagcctccgacactccctctgccacgaccgcagccggacccccaaaagcagagaacaccaacacgagcaagagcactgacttcctggaccccgccaccacaacaagtccccaaaaccacagcgagaccgctggcaacaacaacactcatcaccaagataccggagaagagagtgccagcagcgggaagctaggcttaattaccaatactattgctggagtcgcaggactgatcacaggcgggagaagaactcgaagagaagcaattgtcaatgctcaacccaaatgcaaccctaatttacattactggactactcaggatgaaggtgctgcaatcggactggcctggataccatatttcgggccagcagccgagggaatttacatagaggggctaatgcacaatcaagatggtttaatctgtgggttgagacagctggccaacgagacgactcaagctcttcaactgttcctgagagccacaactgagctacgcaccttttcaatcctcaaccgtaaggcaattgatttcttgctgcagcgatggggcggcacatgccacattctgggaccggactgctgtatcgaaccacatgattggaccaagaacataacagacaaaattgatcagattattcatgattttgttgataaaacccttccggaccagggggacaatgacaattggtggacaggatggagacaatggataccggcaggtattggagttacaggcgttataattgcagttatcgctttattctgtatatgcaaatttgtcttttag

SEQ ID NO: 805 - DNA, 1095 bp, Zaire ebolavirus
  source 1..1095: mol_type = unassigned DNA
atgggcgttacaggaatattgcagttacctcgtgatcgattcaagaggacatcattctttctttgggtaattatccttttccaaagaacattttccatcccacttggagtcatccacaatagcacattacaggttagtgatgtcgacaaactagtttgtcgtgacaaactgtcatccacaaatcaattgagatcagttggactgaatctcgaagggaatggagtggcaactgacgtgccatctgcaactaaaagatggggcttcaggtccggtgtcccaccaaaggtggtcaattatgaagctggtgaatgggctgaaaactgctacaatcttgaaatcaaaaaacctgacgggagtgagtgtctaccagcagcgccagacgggattcggggcttcccccggtgccggtatgtgcacaaagtatcaggaacgggaccgtgtgccggagactttgccttccataaagagggtgctttcttcctgtatgatcgacttgcttccacagttatctaccgaggaacgactttcgctgaaggtgtcgttgcatttctgatactgccccaagctaagaaggacttcttcagctcacaccccttgagagagccggtcaatgcaacggaggacccgtctagtggctactattctaccacaattagatatcaggctaccggttttggaaccaatgagacagagtacttgttcgaggttgacaatttgacctacgtccaacttgaatcaagattcacaccacagtttctgctccagctgaatgagacaatatatacaagtgggaaaaggagcaataccacgggaaaactaatttggaaggtcaaccccgaaattgatacaacaatcggggagtgggccttctgggaaactaaaaaaacctcactagaaaaattcgcagtgaagagttgtctttcacagttgtatcaaacggagccaaaaacatcagtggtcagagtccggcgcgaacttcttccgacccagggaccaacacaacaactgaagaccacaaaatcatggcttcagaaaattcctctgcaatggttcaagtgcacagtcaaggaagggaagctgcagtgtcgcatctaa

SEQ ID NO: 806 - DNA, 894 bp, Zaire ebolavirus
  source 1..894: mol_type = unassigned DNA
atgggcgttacaggaatattgcagttacctcgtgatcgattcaagaggacatcattctttctttgggtaattatccttttccaaagaacattttccatcccacttggagtcatccacaatagcacattacaggttagtgatgtcgacaaactagtttgtcgtgacaaactgtcatccacaaatcaattgagatcagttggactgaatctcgaagggaatggagtggcaactgacgtgccatctgcaactaaaagatggggcttcaggtccggtgtcccaccaaaggtggtcaattatgaagctggtgaatgggctgaaaactgctacaatcttgaaatcaaaaaacctgacgggagtgagtgtctaccagcagcgccagacgggattcggggcttcccccggtgccggtatgtgcacaaagtatcaggaacgggaccgtgtgccggagactttgccttccataaagagggtgctttcttcctgtatgatcgacttgcttccacagttatctaccgaggaacgactttcgctgaaggtgtcgttgcatttctgatactgccccaagctaagaaggacttcttcagctcacaccccttgagagagccggtcaatgcaacggaggacccgtctagtggctactattctaccacaattagatatcaggctaccggttttggaaccaatgagacagagtacttgttcgaggttgacaatttgacctacgtccaacttgaatcaagattcacaccacagtttctgctccagctgaatgagacaatatatacaagtgggaaaaggagcaataccacgggaaaactaatttggaaggtcaaccccgaaattgatacaacaatcggggagtgggccttctgggaaactaaaaaacctcactag

SEQ ID NO: 807 - DNA, 867 bp, Zaire ebolavirus
  source 1..867: mol_type = unassigned DNA
atggaagcttcatatgagagaggacgcccacgagctgccagacagcattcaagggatggacacgaccaccatgttcgagcacgatcatcatccagagagaattatcgaggtgagtaccgtcaatcaaggagcgcctcacaagtgcgcgttcctactgtatttcataagaagagagttgaaccattaacagttcctccagcacctaaagacatatgtccgaccttgaaaaaaggatttttgtgtgacagtagtttttgcaaaaaagatcaccagttggagagtttaactgatagggaattactcctactaatcgcccgtaagacttgtggatcagtagaacaacaattaaatataactgcacccaaggactcgcgcttagcaaatccaacggctgatgatttccagcaagaggaaggtccaaaaattaccttgttgacactgatcaagacggcagaacactgggcgagacaagacatcagaaccatagaggattcaaaattaagagcattgttgactctatgtgctgtgatgacgaggaaattctcaaaatcccagctgagtcttttatgtgagacacacctaaggcgcgaggggcttgggcaagatcaggcagaacccgttctcgaagtatatcaacgattacacagtgataaaggaggcagttttgaagctgcactatggcaacaatgggaccgacaatccctaattatgtttatcactgcattcttgaatattgctctccagttaccgtgtgaaagttctgctgtcgttgtttcagggttaagaacattggttcctcaatcagataatgaggaagcttcaaccaacccggggacatgctcatggtctgatgagggtaccccttaa

SEQ ID NO: 808 - DNA, 756 bp, Zaire ebolavirus
  source 1..756: mol_type = unassigned DNA
atggctaaagctacgggacgatacaatctaatatcgcccaaaaaggacctggagaaaggggttgtcttaagcgacctctgtaacttcttagttagccaaactattcaggggtggaaggtttattgggctggtattgagtttgatgtgactcacaaaggaatggccctattgcatagactgaaaactaatgactttgcccctgcatggtcaatgacaaggaatctctttcctcatttatttcaaaatccgaattccacaattgaatcaccgctgtgggcattgagagtcatccttgcagcagggatacaggaccagctgattgaccagtctttgattgaacccttagcaggagcccttggtctgatctctgattggctgctaacaaccaacactaaccatttcaacatgcgaacacaacgtgtcaaggaacaattgagcctaaaaatgctgtcgttgattcgatccaatattctcaagtttattaacaaattggatgctctacatgtcgtgaactacaacggattgttgagcagtattgaaattggaactcaaaatcatacaatcatcataactcgaactaacatgggttttctggtggagctccaagaacccgacaaatcggcaatgaaccgcatgaagcctgggccggcgaaattttccctccttcatgagtccacactgaaagcatttacacaaggatcctcgacacgaatgcaaagtttgattcttgaatttaatagctctcttgctatctaa

SEQ ID NO: 809 - DNA, 6639 bp, Zaire ebolavirus
  source 1..6639: mol_type = unassigned DNA
atggctacacaacatacccaatacccagacgctaggttatcatcaccaattgtattggaccaatgtgacctagtcactagagcttgcgggttatattcatcatactcccttaatccgcaactacgcaactgtaaactcccgaaacatatctaccgtttgaaatacgatgtaactgttaccaagttcttgagtgatgtaccagtggcgacattgcccatagatttcatagtcccagttcttctcaaggcactgtcaggcaatggattctgtcctgttgagccgcggtgccaacagttcttagatgaaatcattaagtacacaatgcaagatgctctcttcttgaaatattatctcaaaaatgtgggtgctcaagaagactgtgttgatgaacactttcaagagaaaatcttatcttcaattcagggcaatgaatttttacatcaaatgtttttctggtatgatctggctattttaactcgaaggggtagattaaatcgaggaaactctagatcaacatggtttgttcatgatgatttaatagacatcttaggctatggggactatgttttttggaagatcccaatttcaatgttaccactgaacacacaaggaatcccccatgctgctatggactggtatcaggcatcagtattcaaagaagcggttcaagggcatacacacattgtttctgtttctactgccgacgtcttgataatgtgcaaagatttaattacatgtcgattcaacacaactctaatctcaaaaatagcagagattgaggatccagtttgttctgattatcccaattttaagattgtgtctatgctttaccagagcggagattacttactctccatattagggtctgatgggtataaaattattaagttcctcgaaccattgtgcttggccaaaattcaattatgctcaaagtacactgagaggaagggccgattcttaacacaaatgcatttagctgtaaatcacaccctagaagaaattacagaaatgcgtgcactaaagccttcacaggctcaaaagatccgtgaattccatagaacattgataaggctggagatgacgccacaacaactttgtgagctattttccattcaaaaacactgggggcatcctgtgctacatagtgaaacagcaatccaaaaagttaaaaaacatgctacggtgctaaaagcattacgccctatagtgattttcgagacatactgtgtttttaaatatagtattgccaaacattattttgatagtcaaggatcttggtacagtgttacttcagataggaatctaacaccgggtcttaattcttatatcaaaagaaatcaattccctccgttgccaatgattaaagaactactatgggaattttaccaccttgaccaccctccacttttctcaaccaaaattattagtgacttaagtatttttataaaagacagagctaccgcagtagaaaggacatgctgggatgcagtattcgagcctaatgttctaggatataatccacctcacaaatttagtactaaacgtgtaccggaacaatttttagagcaagaaaacttttctattgagaatgttctttcctacgcacaaaaactcgagtatctactaccacaatatcggaacttttctttctcattgaaagagaaagagttgaatgtaggtagaaccttcggaaaattgccttatccgactcgcaatgttcaaacactttgtgaagctctgttagctgatggtcttgctaaagcatttcctagcaatatgatggtagttacggaacgtgagcaaaaagaaagcttattgcatcaagcatcatggcaccacacaagtgatgattttggtgaacatgccacagttagagggagtagctttgtaactgatttagagaaatacaatcttgcatttagatatgagtttacagcaccttttatagaatattgcaaccgttgctatggtgttaagaatgtttttaattggatgcattatacaatcccacagtgttatatgcatgtcagtgattattataatccaccacataacctcacactggagaatcgagacaacccccccgaagggcctagttcatacaggggtcatatgggagggattgaaggactgcaacaaaaactctggacaagtatttcatgtgctcaaatttctttagttgaaattaagactggttttaagttacgctcagctgtgatgggtgacaatcagtgcattactgttttatcagtcttccccttagagactgacgcagacgagcaggaacagagcgccgaagacaatgcagcgagggtggccgccagcctagcaaaagttacaagtgcctgtggaatctttttaaaacctgatgaaacatttgtacattcaggttttatctattttggaaaaaaacaatatttgaatggggtccaattgcctcagtcccttaaaacggctacaagaatggcaccattgtctgatgcaatttttgatgatcttcaagggaccctggctagtataggcactgcttttgagcgatccatctctgagacacgacatatctttccttgcaggataaccgcagctttccatacgtttttttcggtgagaatcttgcaatatcatcatctcgggttcaataaaggttttgaccttggacagttaacactcggcaaacctctggatttcggaacaatatcattggcactagcggtaccgcaggtgcttggagggttatccttcttgaatcctgagaaatgtttctaccggaatctaggagatccagttacctcaggcttattccagttaaaaacttatctccgaatgattgagatggatgatttattcttacctttaattgcgaagaaccctgggaactgcactgccattgactttgtgctaaatcctagcggattaaatgtccctgggtcgcaagacttaacttcatttctgcgccagattgtacgcaggaccatcaccctaagtgcgaaaaacaaacttattaataccttatttcatgcgtcagctgacttcgaagacgaaatggtttgtaaatggctattatcatcaactcctgttatgagtcgttttgcggccgatatcttttcacgcacgccgagcgggaagcgattgcaaattctaggatacctggaaggaacacgcacattattagcctctaagatcatcaacaataatacagagacaccggttttggacagactgaggaaaataacattgcaaaggtggagcctatggtttagttatcttgatcattgtgataatatcctggcggaggctttaacccaaataacttgcacagttgatttagcacagattctgagggaatattcatgggctcatattttagagggaagacctcttattggagccacactcccatgtatgattgagcaattcaaagtgttttggctgaaaccctacgaacaatgtccgcagtgttcaaatgcaaagcaaccaggtgggaaaccattcgtgtcagtggcagtcaagaaacatattgttagtgcatggccgaacgcatcccgaataagctggactatcggggatggaatcccatacattggatcaaggacagaagataagataggacaacctgctattaaaccaaaatgtccttccgcagccttaagagaggccattgaattggcgtcccgtttaacatgggtaactcaaggcagttcgaacagtgacttgctaataaaaccatttttggaagcacgagtaaatttaagtgttcaagaaatacttcaaatgaccccttcacattactcaggaaatattgttcacaggtacaacgatcaatacagtcctcattctttcatggccaatcgtatgagtaattcagcaacgcgattgattgtttctacaaacactttaggtgagttttcaggaggtggccagtctgcacgcgacagcaatattattttccagaatgttataaattatgcagttgcactgttcgatattaaatttagaaacactgaggctacagatatccaatataatcgtgctcaccttcatctaactaagtgttgcacccgggaagtaccagctcagtatttaacatacacatctacattggatttagatttaacaagataccgagaaaacgaattgatttatgacagtaatcctctaaaaggaggactcaattgcaatatctcattcgataatccatttttccaaggtaaacggctgaacattatagaagatgatcttattcgactgcctcacttatctggatgggagctagccaagaccatcatgcaatcaattatttcagatagcaacaattcatctacagacccaattagcagtggagaaacaagatcattcactacccatttcttaacttatcccaagataggacttctgtacagttttggggcctttgtaagttattatcttggcaatacaattcttcggactaagaaattaacacttgacaattttttatattacttaactactcaaattcataatctaccacatcgctcattgcgaatacttaagccaacattcaaacatgcaagcgttatgtcacggttaatgagtattgatcctcatttttctatttacataggcggtgctgcaggtgacagaggactctcagatgcggccaggttatttttgagaacgtccatttcatcttttcttacatttgtaaaagaatggataattaatcgcggaacaattgtccctttatggatagtatatccgctagagggtcaaaacccaacacctgtgaataattttctctatcagatcgtagaactgctggtgcatgattcatcaagacaacaggcttttaaaactaccataagtgatcatgtacatcctcacgacaatcttgtttacacatgtaagagtacagccagcaatttcttccatgcatcattggcgtactggaggagcagacacagaaacagcaaccgaaaatacttggcaagagactcttcaactggatcaagcacaaacaacagtgatggtcatattgagagaagtcaagaacaaaccaccagagatccacatgatggcactgaacggaatctagtcctacaaatgagccatgaaataaaaagaacgacaattccacaagaaaacacgcaccagggtccgtcgttccagtcctttctaagtgactctgcttgtggtacagcaaatccaaaactaaatttcgatcgatcgagacacaatgtgaaatttcaggatcataactcggcatccaagagggaaggtcatcaaataatctcacaccgtctagtcctacctttctttacattatctcaagggacacgccaattaacgtcatccaatgagtcacaaacccaagacgagatatcaaagtacttacggcaattgagatccgtcattgataccacagtttattgtagatttaccggtatagtctcgtccatgcattacaaacttgatgaggtcctttgggaaatagagagtttcaagtcggctgtgacgctagcagagggagaaggtgctggtgccttactattgattcagaaataccaagttaagaccttatttttcaacacgctagctactgagtccagtatagagtcagaaatagtatcaggaatgactactcctaggatgcttctacctgttatgtcaaaattccataatgaccaaattgagattattcttaacaactcagcaagccaaataacagacataacaaatcctacttggtttaaagaccaaagagcaaggctacctaagcaagtcgaggttataaccatggatgcagagacaacagagaatataaacagatcgaaattgtacgaagctgtatataaattgatcttacaccatattgatcctagcgtattgaaagcagtggtccttaaagtctttctaagtgatactgagggtatgttatggctaaatgataatttagccccgttttttgccactggttatttaattaagccaataacgtcaagtgctagatctagtgagtggtatctttgtctgacgaacttcttatcaactacacgtaagatgccacaccaaaaccatctcagttgtaaacaggtaatacttacggcattgcaactgcaaattcaacgaagcccatactggctaagtcatttaactcagtatgctgactgtgagttacatttaagttatatccgccttggttttccatcattagagaaagtactataccacaggtataacctcgtcgattcaaaaagaggtccactagtctctatcactcagcacttagcacatcttagagcagagattcgagaattaactaatgattataatcaacagcgacaaagtcggactcaaacatatcactttattcgtactgcaaaaggacgaatcacaaaactagtcaatgattatttaaaattctttcttattgtgcaagcattaaaacataatgggacatggcaagctgagtttaagaaattaccagagttgattagtgtgtgcaataggttctaccatattagagattgcaattgtgaagaacgtttcttagttcaaaccttatatttacatagaatgcaggattctgaagttaagcttatcgaaaggctgacagggcttctgagtttatttccggatggtctctacaggtttgattga

SEQ ID NO: 810-850 - skipped (41 entries)

SEQ ID NO: 851 - protein, 739 aa, Zaire ebolavirus
MDSRPQKIWMAPSLTESDMDYHKILTAGLSVQQGIVRQRVIPVYQVNNLEEICQLIIQAFEAGVDFQESADSFLLMLCLHHAYQGDYKLFLESGAVKYLEGHGFRFEVKKRDGVKRLEELLPAVSSGKNIKRTLAAMPEEETTEANAGQFLSFASLFLPKLVVGEKACLEKVQRQIQVHAEQGLIQYPTAWQSVGHMMVIFRLMRTNFLIKFLLIHQGMHMVAGHDANDAVISNSVAQARFSGLLIVKTVLDHILQKTERGVRLHPLARTAKVKNEVNSFKAALSSLAKHGEYAPFARLLNLSGVNNLEHGLFPQLSAIALGVATAHGSTLAGVNVGEQYQQLREAATEAEKQLQQYAESRELDHLGLDDQEKKILMNFHQKKNEISFQQTNAMVTLRKERLAKLTEAITAASLPKTSGHYDDDDDIPFPGPINDDDNPGHQDDDPTDSQDTTIPDVVVDPDDGSYGEYQSYSENGMNAPDDLVLFDLDEDDEDTKPVPNRSTKGGQQKNSQKGQHIEGRQTQSRPIQNVPGPHRTIHHASAPLTDNDRRNEPSGSTSPRMLTPINEEADPLDDADDETSSLPPLESDDEEQDRDGTSNRTPTVAPPAPVYRDHSEKKELPQDEQQDQDHTQEARNQDSDNTQSEHSFEEMYRHILRSQGPFDAVLYYHMMKDEPVVFSTSDGKEYTYPDSLEEEYPPWLTEKEAMNEENRFVTLDGQQFYWPVMNHKNKFMAILQHHQ

SEQ ID NO: 852 - protein, 340 aa, Zaire ebolavirus
MTTRTKGRGHTAATTQNDRMPGPELSGWISEQLMTGRIPVSDIFCDIENNPGLCYASQMQQTKPNPKTRNSQTQTDPICNHSFEEVVQTLASLATVVQQQTIASESLEQRITSLENGLKPVYDMAKTISSLNRVCAEMVAKYDLLVMTTGRATATAAATEAYWAEHGQPPPGPSLYEESAIRGKIESRDETVPQSVREAFNNLNSTTSLTEENFGKPDISAKDLRNIMYDHLPGFGTAFHQLVQVICKLGKDSNSLDIIHAEFQASLAEGDSPQCALIQITKRVPIFQDAAPPVIHIRSRGDIPRACQKSLRPVPPSPKIDRGWVCVFQLQDGKTLGLKI

SEQ ID NO: 853 - protein, 326 aa, Zaire ebolavirus
MRRVILPTAPPEYMEAIYPVRSNSTIARGGNSNTGFLTPESVNGDTPSNPLRPIADDTIDHASHTPGSVSSAFILEAMVNVISGPKVLMKQIPIWLPLGVADQKTYSFDSTTAAIMLASYTITHFGKATNPLVRVNRLGPGIPDHPLRLLRIGNQAFLQEFVLPPVQLPQYFTFDLTALKLITQPLPAATWTDDTPTGSNGALRPGISFHPKLRPILLPNKSGKKGNSADLTSPEKIQAIMTSLQDFKIVPIDPTKNIMGIEVPETLVHKLTGKKVTSKNGQPIIPVLLPKYIGLDPVAPGDLTMVITQDCDTCHSPASLPAVIEK

SEQ ID NO: 854 - protein, 676 aa, Zaire ebolavirus
MGVTGILQLPRDRFKRTSFFLWVIILFQRTFSIPLGVIHNSTLQVSDVDKLVCRDKLSSTNQLRSVGLNLEGNGVATDVPSATKRWGFRSGVPPKVVNYEAGEWAENCYNLEIKKPDGSECLPAAPDGIRGFPRCRYVHKVSGTGPCAGDFAFHKEGAFFLYDRLASTVIYRGTTFAEGVVAFLILPQAKKDFFSSHPLREPVNATEDPSSGYYSTTIRYQATGFGTNETEYLFEVDNLTYVQLESRFTPQFLLQLNETIYTSGKRSNTTGKLIWKVNPEIDTTIGEWAFWETKKNLTRKIRSEELSFTVVSNGAKNISGQSPARTSSDPGTNTTTEDHKIMASENSSAMVQVHSQGREAAVSHLTTLATISTSPQSLTTKPGPDNSTHNTPVYKLDISEATQVEQHHRRTDNDSTASDTPSATTAAGPPKAENTNTSKSTDFLDPATTTSPQNHSETAGNNNTHHQDTGEESASSGKLGLITNTIAGVAGLITGGRRTRREAIVNAQPKCNPNLHYWTTQDEGAAIGLAWIPYFGPAAEGIYIEGLMHNQDGLICGLRQLANETTQALQLFLRATTELRTFSILNRKAIDFLLQRWGGTCHILGPDCCIEPHDWTKNITDKIDQIIHDFVDKTLPDQGDNDNWWTGWRQWIPAGIGVTGVIIAVIALFCICKFVF

SEQ ID NO: 855 - protein, 364 aa, Zaire ebolavirus
MGVTGILQLPRDRFKRTSFFLWVIILFQRTFSIPLGVIHNSTLQVSDVDKLVCRDKLSSTNQLRSVGLNLEGNGVATDVPSATKRWGFRSGVPPKVVNYEAGEWAENCYNLEIKKPDGSECLPAAPDGIRGFPRCRYVHKVSGTGPCAGDFAFHKEGAFFLYDRLASTVIYRGTTFAEGVVAFLILPQAKKDFFSSHPLREPVNATEDPSSGYYSTTIRYQATGFGTNETEYLFEVDNLTYVQLESRFTPQFLLQLNETIYTSGKRSNTTGKLIWKVNPEIDTTIGEWAFWETKKTSLEKFAVKSCLSQLYQTEPKTSVVRVRRELLPTQGPTQQLKTTKSWLQKIPLQWFKCTVKEGKLQCRI

SEQ ID NO: 856 - protein, 297 aa, Zaire ebolavirus
MGVTGILQLPRDRFKRTSFFLWVIILFQRTFSIPLGVIHNSTLQVSDVDKLVCRDKLSSTNQLRSVGLNLEGNGVATDVPSATKRWGFRSGVPPKVVNYEAGEWAENCYNLEIKKPDGSECLPAAPDGIRGFPRCRYVHKVSGTGPCAGDFAFHKEGAFFLYDRLASTVIYRGTTFAEGVVAFLILPQAKKDFFSSHPLREPVNATEDPSSGYYSTTIRYQATGFGTNETEYLFEVDNLTYVQLESRFTPQFLLQLNETIYTSGKRSNTTGKLIWKVNPEIDTTIGEWAFWETKKPH

SEQ ID NO: 857 - protein, 288 aa, Zaire ebolavirus
MEASYERGRPRAARQHSRDGHDHHVRARSSSRENYRGEYRQSRSASQVRVPTVFHKKRVEPLTVPPAPKDICPTLKKGFLCDSSFCKKDHQLESLTDRELLLLIARKTCGSVEQQLNITAPKDSRLANPTADDFQQEEGPKITLLTLIKTAEHWARQDIRTIEDSKLRALLTLCAVMTRKFSKSQLSLLCETHLRREGLGQDQAEPVLEVYQRLHSDKGGSFEAALWQQWDRQSLIMFITAFLNIALQLPCESSAVVVSGLRTLVPQSDNEEASTNPGTCSWSDEGTP

SEQ ID NO: 858 - protein, 251 aa, Zaire ebolavirus
MAKATGRYNLISPKKDLEKGVVLSDLCNFLVSQTIQGWKVYWAGIEFDVTHKGMALLHRLKTNDFAPAWSMTRNLFPHLFQNPNSTIESPLWALRVILAAGIQDQLIDQSLIEPLAGALGLISDWLLTTNTNHFNMRTQRVKEQLSLKMLSLIRSNILKFINKLDALHVVNYNGLLSSIEIGTQNHTIIITRTNMGFLVELQEPDKSAMNRMKPGPAKFSLLHESTLKAFTQGSSTRMQSLILEFNSSLAI

SEQ ID NO: 859 - protein, 2212 aa, Zaire ebolavirus
MATQHTQYPDARLSSPIVLDQCDLVTRACGLYSSYSLNPQLRNCKLPKHIYRLKYDVTVTKFLSDVPVATLPIDFIVPVLLKALSGNGFCPVEPRCQQFLDEIIKYTMQDALFLKYYLKNVGAQEDCVDEHFQEKILSSIQGNEFLHQMFFWYDLAILTRRGRLNRGNSRSTWFVHDDLIDILGYGDYVFWKIPISMLPLNTQGIPHAAMDWYQASVFKEAVQGHTHIVSVSTADVLIMCKDLITCRFNTTLISKIAEIEDPVCSDYPNFKIVSMLYQSGDYLLSILGSDGYKIIKFLEPLCLAKIQLCSKYTERKGRFLTQMHLAVNHTLEEITEMRALKPSQAQKIREFHRTLIRLEMTPQQLCELFSIQKHWGHPVLHSETAIQKVKKHATVLKALRPIVIFETYCVFKYSIAKHYFDSQGSWYSVTSDRNLTPGLNSYIKRNQFPPLPMIKELLWEFYHLDHPPLFSTKIISDLSIFIKDRATAVERTCWDAVFEPNVLGYNPPHKFSTKRVPEQFLEQENFSIENVLSYAQKLEYLLPQYRNFSFSLKEKELNVGRTFGKLPYPTRNVQTLCEALLADGLAKAFPSNMMVVTEREQKESLLHQASWHHTSDDFGEHATVRGSSFVTDLEKYNLAFRYEFTAPFIEYCNRCYGVKNVFNWMHYTIPQCYMHVSDYYNPPHNLTLENRDNPPEGPSSYRGHMGGIEGLQQKLWTSISCAQISLVEIKTGFKLRSAVMGDNQCITVLSVFPLETDADEQEQSAEDNAARVAASLAKVTSACGIFLKPDETFVHSGFIYFGKKQYLNGVQLPQSLKTATRMAPLSDAIFDDLQGTLASIGTAFERSISETRHIFPCRITAAFHTFFSVRILQYHHLGFNKGFDLGQLTLGKPLDFGTISLALAVPQVLGGLSFLNPEKCFYRNLGDPVTSGLFQLKTYLRMIEMDDLFLPLIAKNPGNCTAIDFVLNPSGLNVPGSQDLTSFLRQIVRRTITLSAKNKLINTLFHASADFEDEMVCKWLLSSTPVMSRFAADIFSRTPSGKRLQILGYLEGTRTLLASKIINNNTETPVLDRLRKITLQRWSLWFSYLDHCDNILAEALTQITCTVDLAQILREYSWAHILEGRPLIGATLPCMIEQFKVFWLKPYEQCPQCSNAKQPGGKPFVSVAVKKHIVSAWPNASRISWTIGDGIPYIGSRTEDKIGQPAIKPKCPSAALREAIELASRLTWVTQGSSNSDLLIKPFLEARVNLSVQEILQMTPSHYSGNIVHRYNDQYSPHSFMANRMSNSATRLIVSTNTLGEFSGGGQSARDSNIIFQNVINYAVALFDIKFRNTEATDIQYNRAHLHLTKCCTREVPAQYLTYTSTLDLDLTRYRENELIYDSNPLKGGLNCNISFDNPFFQGKRLNIIEDDLIRLPHLSGWELAKTIMQSIISDSNNSSTDPISSGETRSFTTHFLTYPKIGLLYSFGAFVSYYLGNTILRTKKLTLDNFLYYLTTQIHNLPHRSLRILKPTFKHASVMSRLMSIDPHFSIYIGGAAGDRGLSDAARLFLRTSISSFLTFVKEWIINRGTIVPLWIVYPLEGQNPTPVNNFLYQIVELLVHDSSRQQAFKTTISDHVHPHDNLVYTCKSTASNFFHASLAYWRSRHRNSNRKYLARDSSTGSSTNNSDGHIERSQEQTTRDPHDGTERNLVLQMSHEIKRTTIPQENTHQGPSFQSFLSDSACGTANPKLNFDRSRHNVKFQDHNSASKREGHQIISHRLVLPFFTLSQGTRQLTSSNESQTQDEISKYLRQLRSVIDTTVYCRFTGIVSSMHYKLDEVLWEIESFKSAVTLAEGEGAGALLLIQKYQVKTLFFNTLATESSIESEIVSGMTTPRMLLPVMSKFHNDQIEIILNNSASQITDITNPTWFKDQRARLPKQVEVITMDAETTENINRSKLYEAVYKLILHHIDPSVLKAVVLKVFLSDTEGMLWLNDNLAPFFATGYLIKPITSSARSSEWYLCLTNFLSTTRKMPHQNHLSCKQVILTALQLQIQRSPYWLSHLTQYADCELHLSYIRLGFPSLEKVLYHRYNLVDSKRGPLVSITQHLAHLRAEIRELTNDYNQQRQSRTQTYHFIRTAKGRITKLVNDYLKFFLIVQALKHNGTWQAEFKKLPELISVCNRFYHIRDCNCEERFLVQTLYLHRMQDSEVKLIERLTGLLSLFPDGLYRFD

SEQ ID NO: 860-900 - skipped (41 entries)

SEQ ID NO: 901 - DNA, 1338 bp, Clostridium botulinum
  source 1..1338: mol_type = unassigned DNA
atgagtacccaccttacagaaacctgggaaaaagcaataaatattataaaaggtgaacttacagaagtaagttttaatacatggattaaaagtattaaccctatttctcttgaaaataattcattgaaactagctgtaccaaatgattttacaaaaggaattcttgaaagtaggtacaaagatcttatagttaatgcgctaaaattacttacctcaaaaaaatataatatagattttattgtaactactgaagaaaaaatagaaaaaaatcataataacgaaaaatctaatatagttgtaaatgatgaaatgtctactatgttaaatcctaaatatacttttgattcgtttgtaataggaaatagtaatagattcgctcatgcagcatctttagcagtagcagaatcacctgctaaagcatataatcctttatttatatatggtggagttggtcttggtaaaactcacttaatgcatgctatcggtcattatatattacataacaatcctaaatctcaagtagtttatgtatcttctgagaaatttacaaatgaattaattaattctataaaagatgataaaaatgtagaatttagaaataaatatagaaatatagatattttattagttgatgatattcaatttattgctggaaaagaaagaactcaagaggaatttttccatacttttaatgcactgtatgaagctaacaaacaaataattatatcaagtgaccgccccccaaaagaaatacctaccttagaagatagattaagatctagatttgaatggggacttatagctgatattcaagcacctgattttgaaaccaggatggctattttaaagaaaaaagctgatgtagaaaaattaaatattcctaatgaagtaatggtatatatagctacaaaaattaaatcaaatattcgtgaattagaaggagctttgataagaatagtagccttttcatcacttactaataaagaaataagtgtagatttagcttctgaagcactgaaagatataatctcaagtaagcaaacaaggcaagtcactatagatattatccaagaagttgtagcaaactattataatctaaaaatagaagatctaaaatcagctagaagaacacgaaatattgcttttcctcgccaaatagctatgtacctttctagaaaactaacggatatgtcattacctaaaattggtgaagaatttggaggacgtgatcatactacagttatccatgcctatgaaaaaatatctaataacttaaaaaaagatgaaagtcttcaaaatgcaataaacgaattaaataaacgaattaatcaaaaataa

SEQ ID NO: 902 - DNA, 1104 bp, Clostridium botulinum
  source 1..1104: mol_type = unassigned DNA
atgaaaataacttgtcaaaaaaacattttactagaaggtatatctatagttcaaaaagcagtaactggaaaatcaaccttacctatattatctggaatacttattagagctaataaaaatgaattggtcttaactggttctgatatggatcttagtattgaaactaaagtaaaagctaatattttagaagagggaactatagttttggatgctagactttttggtgaaataataaggaaattaccgaatgatctaatagaaataaatacattagaagataattctatagaaataatatgtcaaaattctagatttaatctaatatatatgaatccagatgaatttcctaatccacctattattaatgaaaatatgattttttcaataggtgaaaataaattaaaaaatatgattaaaggaactatatttgctacagctcaagatgaaacaagacctattcttacaggtgttttatttcaaataaaagataaaatgttgaatttagtagctttagatggttacagattagctttaagaagtgaaattgttgataatgataataccataaatgccgttattccaggaaaaacattaaatgaagtttcaaagatcttagaagaagatgatgaaaatgttaatattacatttactcctaatcatattttatttagtataggagaaacaaaaataatttctagattattggaaggagaatttattagctataaatctataatacctgaagaatataatctaaaaataatagctaaaagattagaacttttaaattccatagaaagagcctctcttatggctaaagaaggaaatactaatctagttaaatttgatttttcaaatgataaaattgtaataacatcaaattctcaattaggaatggttagagaagaattaaaggttgtattgcaaggagaagatttgcaaattgcatttaactcaaaatatcttttagatgtattaaaaactatggaaggcgatgaggttgtattggaattttcaagtagtgtaagtccttgtattataaaaaatacagaactaaataattgtacttatttagttttaccagtaagattaaataataattaa

SEQ ID NO: 903 - DNA, 207 bp, Clostridium botulinum
  source 1..207: mol_type = unassigned DNA
atgattgaagtaaaaattaattcagaagtaataaaattagactcttttttaaaatggtcaggggcaacaactttaggttcagaggctaaattttttatacaaaacggagaagttaaagttaatggagaaatagaaaaaagaagaggtagaaaacttaaaatcggagacttgatagagtttaataatgaaacatataaaattatttaa

SEQ ID NO: 904 - DNA, 1095 bp, Clostridium botulinum
  source 1..1095: mol_type = unassigned DNA
atgtatataaaaaatgtgcacttaataaattttagaaattatgatgatatgtatttagaattaagtccaaatacaaatatttttgtaggtaataatgctcaagggaaaactaacatactagaaagtatatattattcaagtataggaaagtctcatagaacaaataaagataaagatcttataaaatgggataaaaataatacatacttaaggacatatgtatccagagaaagattagataaaactatagatataaatatatttaaaaatggcaaaaaagctataactgtaaataaaataaaaataaaaaaaatatctgaactaatggggaacttaaatgttgttatgttttctccagaagacttaagaataattaaggattctcctgggaatagaaggaaatttctagatatagaattatgtaaaataaacaatgtttattatcatgatttagtccaatataataaaattttatctgaaagaaatacagctttaaaaaattggaataacaaaattaatgatataattgatgtttatgatgagcaactttctaaatatggagcttttataattaaagagagaaataagtatttggataaattaaatattattggcaaaaatatacataacaagataaccaatgatttagaagatataaactttaggtatttaactaatataaaagattttgataatgcagaaaaagaattattaatgctttttaagaaaaatcgaaaaaaagatcttgagagaaattcaacttctattggtcctcatagagatgattttgaagtcagtataaacaatatagatactagaatttttggatcacaaggacaacaaagaacagctgtactaactttaaagtttgcatcattggaaataataaagaatataataggggaatatcctgtacttttattagatgatgtactatctgaattagattcaaatagacaaaagtttgtattgaattctattgataaaatacaaactataataacttgtactggtatagaagaaatagacaaatacttagataagaaacaatctcaattatatttagttaataatggtaagataaaaagagtttaa

SEQ ID NO: 905 - DNA, 264 bp, Clostridium botulinum
  source 1..264: mol_type = unassigned DNA
atgtttcttcacttaggagaaaatgtagtagtaccgataaaagatgttataggaatattcgacatggaaacttctatgtatagttcagatactatacaatttttaagattagctgaagaggatggatttgttgaaagaataactaaagagaaaccaaaatcttttgttatagctgaagtagataaaaagagtaagatatatttgtctcctatatcttcagctacactaactaaaagaacaaaagttttgtataatgagctataa

SEQ ID NO: 906 - DNA, 1914 bp, Clostridium botulinum
  source 1..1914: mol_type = unassigned DNA
atgtcacaagaaaataaacaagtttatgatgaaagtcaaattcaagtgctagaaggtttagaagctgttagaaaaagaccaggaatgtatattggaagcactagtttaaggggacttcatcatttggtttatgaaatagttgataatagtatagatgaagcacttgctggcttttgtacacatatagaagtttttatacataaagataattctataactgttgtagatgatggacgtggaatgccagttggtatgcattcaaaggtaaaaaaacctgctgttgaagtaataatgactatattacatgcaggtggaaaatttggtggtggaggctacaaggtttctggtggacttcatggtgttggagcttctgttgttaatgccttatcagaacaatgtgaagtagaagtaagaagagaaggccatatttggaaacaaaaattcgaaagaggtataacaaaaactggattagatatagttggagatacggaagatcatggtacaaaaatatattttaaaccagatatcgaaatatttgatgaactagaatttgaatatgatactttagctcacagactcagagaattagcctttttaaacaaaggtataaaaatttcattaacagatgaaagatatgataaaaaagaaatgttccactatgagggcggattgagatcttttgtactttatttaaatagaaataaggaaaaattacatcaacaacctatatatgttgatgaaaataaagatggatgtatagttgagattgctatgcaatataacgatggttatgcagaaaatattttttcctttgctaacaatatagataccatagaaggtggaactcatttagctggatttaaatcagctctaacaagagttataaatgactatgctaggaaatttaattacttaaaggatacagataaaaatttatcaggggatgatgttagagagggattaacagcagttatttcagtaaaattaacagatcctcaatttgaaggtcaaacaaagacaaaattaggaaatggtgaagtaagaggaattgtagatacaatagtaggtcagagtataggttcttttttagaggaaaatcctaatgtaggtaaaataataattgaaaaaggcctatcagcttcaagagctagagaggctgcaaaaagagcaagagaacttactagaagaaaatctattttagaaagcacgtctcttccaggaaaattatcagattgttcttcaaaggatccatcattatgtgaaatttatttggtcgaaggagattccgcaggtggatctgcaaaacagggaagaaatagagaattccaagctatattacctttaaagggtaaaataatgaatgtggaaaagcaaagattggataaaatattagcttcagatgaaatacgtgctatgataactgcatttggagcaggtataggaaaagaatttgatattgataaaataagatataatagaataattataatgacagatgctgacgtagatggagcccatataagaactttacttttaacattcttttatagatacatgaaagaattaatagaggaaggtcatgtttatatagctcaaccaccactttatagaatatataaggctaaaaaagaaatttatgtttattcagatccagaattggatgctgcattattagaattgggtggaaaagataccaatactaatattcaaagatacaaaggtcttggagaaatgaatccagaacaactttgggaaactactatggacccagaacatagaactttattacaggtaacagtagaggacgctatggaggcagatgaaatatttactatacttatgggaacaaaagtagaaccaagaagagactttatagaaagtaatgctgataaagtagttaacttggatatataa

SEQ ID NO: 907 - DNA, 2466 bp, Clostridium botulinum
  source 1..2466: mol_type = unassigned DNA
atgctaaacgaaggaaagattttgcctgtagatgtaagtaaagaaatgaagaaatgttatatagactatgccatgagtgtaatagctggccgtgcattaccagatgtaagggatgggttaaagccagtacatagaagaataatatattcaatgcagggattaggattagctccagaaaaaggttatagaaaatgtgcaagaattgtaggagatgtactgggtaagtatcatcctcatggagatacagcagtttatgaagctttagtaagaatggctcagaatttttcaataagatatacattagtagatggtcatggaaattttggttctgtagatggtgatggagcagcagcaatgagatatacagaagctaagatgagtaaaatatctatggaacttataaaagacataaataaaaatacagttgattttattcctaactttgatggtgaagaagaagaaccatctgtattaccatcaaggtttcctaatcttttagttaatggttcttcaggtatagcagtaggtatggctactaatattccacctcataatttaacagaggttatagatggaataataatgctaatagaaaatgaagatgtaaatatacttgatttaatgactaaaataaaaggaccagatttccctacttctggattaatcgtaggtacaagaggaataagggaagcttatgaaacgggtaggggaaaagttataattagagctaaagctgagattgaagaggaaaaagggaaaaataagataatagttacagaaataccttatcaagttaataaagctagacttatagaaaatatggctaaccttgtaaaggataaaaaaataaatggaatttcagacttaagagatgaatcagatagagatggtatgagaattgttatagaattaaaaagggatgcaaatcctaatatagttttaaaccaattatataagcatacaaaacttcaagatacctttggaataattatgttagctttagttaataaccaacctcaaattttaaatttaaaagaaatattagttaattatgtggaattccaaaaggaagtaataagaagaagaactagatttgacttagataaagcattagcaagggctcatatattagaaggtttaagaatagccttagatcatattgatgaagttataaagcttataagagcatctaaaaatacagctgaagctaaagagggattaatgaataactttaatctttcagaaaaacaagctcaagctatattagatatgaagttacaaaggcttacaggtttagaaagagaaaaaatagaagaagaatataaagaacttatggaaaagataagttattttagagaaatattagataaagaagaattagtactaagtataataaaagaagaattaatagagataaaaaataaatatggtgatgaaagaaaaacagaaatagtaaaaggtgaacatgatatagacatagaggacttaattgaagataaaaaggtgatagtaactttaactcatggtggatacataaaaagattagatatggatacatactcttcacaaaaaagaggaggaaagggtattcaagctacatctacaaaacaggatgattttatagaaaatatgtttgtaacatctactcatagtactatattattctttactaataggggtaaggtatataaacttaaagcttatgaaataccagaagcaggaagaacagctaaaggtacaaatatagtaaatcttatacctatagaaaataatgagaaaatacaaacagtaataggtttaaaagacatagatgacatgaagcattttgtaatgtgtacgagaaatggaataattaaaaagacagagataagtaaatattcttccataagaaaaggtggattaaatgctattaatctgcgagaagatgatgaattaatagatgtaaaaatgaccaaaggaaatgatgaaataatagtagtaacacaaaatgggtactgtataagatttaatgaagaagatgtaagacctatgggaagagttgcaacaggtgttaaggctataacactaagaaaagctgataaggctgtatctatggatgtagtaatagaagatgaaacactattatctataagtgaaaatggatttggtaaacgaacagacatagaagaatatcctatccatagaaggggtggaaaaggtgttataacttataagataactgacaaaacaggacctatagttggagcaaggtttgtaaaagaagatgatgaacttatgcttgtaaatagtggcgatgttgcaataagaataaatgtttcggaaatatctaaaactagtagaaatgctatgggtgtaaaactaatgagaactagtgaagaagaaaaaatagtagctatagctaaaataaagagtgaagacataatagaagaagaaattttaaatgaagaaaatctaaatgaagaataa

SEQ ID NO: 908 - DNA, 453 bp, Clostridium botulinum
  source 1..453: mol_type = unassigned DNA
ttggaatatgaagacatagtatatataaatatgcacttagataatgaggaattaaagatttttaataaattatctataagcgaacaaaagcattctataaaggtagcttatgatatagaaaagttatatgaaaagggtaaatataatctaacaaaagatgagtttataaaggtagctttactacacgatataggaaaattaaattataaagttgatattataaaaaaaagcataatagtaattatggatagaattacaaattccagaataaaaaaatttcaaaatattaagtcagtttatgttcattataatcatccttatttaggttattgtattttgaaacaatataataaatatagtgaaaaaatgttatatttaattaaaaaccatcataatgaaaatattataaataaagagttaagcttattaatatatagtgataatttaaattaa

SEQ ID NO: 909 - DNA, 522 bp, Clostridium botulinum
  source 1..522: mol_type = unassigned DNA
atgaattcaatagaaagaagaaaaaatattgaaaatatgttaatgaaaaacaataaacctattaaaggtagtgaaatgggacaaaaattaggtgtaacaaggcaggttatagtaaaagatatagctattttaagagcttctggtaaaaatataattgctacgcctgaaggttatttaatacctaatgaaaataaacaattaataaggaaaattatagctgtatgccatgatagtaaagatataaaagacgaattagagattataattaaatttggaggaatagtagaagatgttgtagtagaacatcctatatatggagaaataaaagccatgttgatgataaaatctatgtatgacatagataattttataaaaaatatacaaaacaataaggctgaaccgttattaatacttactggtggaattcatttgcatacaatatcttcagataatgaagatataatgaataaaataatagaacaattaaaccaaaaaaattatttagtagatgaggaagtataa

SEQ ID NO: 910 - DNA, 1164 bp, Clostridium botulinum
  source 1..1164: mol_type = unassigned DNA
atggataaagtagcccttttaaaatgtgatgaatatgatttagaaaaggtagagaaaactataagaaatggatttgaacttttaggaggaaactcttttttgaataaacttataccttataatagtaaagttcttttaaaacctaacatgcttagtattgaaaatgaaggttctcctgtggtaactaatagtgtagtttttgaagcagtaataagaatattaggagattattctaataacatatcctttggagattctcctggatttggagattctaaaaaggcagctgaaaaatctggattacttaatatagcaaagaaatataatatagaatttaaagattttaaagaatctattaatgtaagttgtgataattctattttatgcagatcctggactgtagcgaaggcagcttatgaaacagatgtactaataacattacctaaattaaagacacatgctatggcttactttacaggtgcagttaagaatcagtttggatgtataccaggaactttaaaagctacttggcatacaagaatgcctaatgcaaataatttttgtaaaatgttattagatctaaatacattgttagaaactgattttgctatactagatggcattatagctatggaaggaaatggtcctaaaaatggaactccttataatcttaatacaattataatgggggatagccttacagcggtagattccgttgctgttaaaataataggatatgacaatccattagatatacctgtattaaaagaagcttatgatagcaattggggaagtgtttttttaaaggacatagatatattaggtgaaaaaatagatagcatggtcgtagataattttaaactttgtagagagggtggggatttttattttataaatcctaaagttacaaattttttaaaggatattattgcaccagatcctactttaataaaagaaaagtgtataggatgcaatagatgtgctgaagtatgtcctgaaaaaccatatgttatagatatgataaaaaaaggggataaaaaaataccagtttggaatatgaaaaaatgtataagatgtttttgttgtcaggaactttgtcccaaaggagctatagaaactaaatattcttttattggaagatttttaaatagagatggcaggtga

SEQ ID NO: 911 - DNA, 2682 bp, Clostridium botulinum
  source 1..2682: mol_type = unassigned DNA
atgaaaaataaaaaagcattgtttataccattattcataataattttatttatagcattttttaataaaataataaattttattattaatataaaatggtttaaagaagtaaactatttagcggtatattttactaaaatgagagctataattattttaatgattcctatatttataatattttttatatctatatggatgtattataaaagccttattataaacaagaataaaagtgtagtagatataggattaaataaaaacaattatgggaaaaaattattctttatttttaactttatagtatctatatttttagcttatatattttcaagcagttattggtatagaatattacaatttaataattctgtagattttaatgtgaaagatcctatcttttttaaagatgtttctttttatatatttaaattgccactttttgaatctttatataaagttataatttctttattattatttttagttataacaacatttatagcttattttattttagaggctaaatataaaattcaaagtagaaaggatataaatttaaaaaatataaatcatggcataaaatcctttgcgggaaaacaattagctattgtatctggtcttataattctatttatatcctttggacatttaataaaaatatggaatttagtttatagctctaatggagtatcttttggtgccagctatactgatgttcacgctactttattattctataaaataatagtagtaattacactaatttcatctatagtaacattattaagtatagtaaaaggtaaatttaagccagtaagcatatgtataggtataactatatttttgatagtatcacaaaatatagcatcttttttagtacaaaactttatagtcaaatctaatgaaaaaactttagagcaaccatatataaaaaataatatagatttaacaagaaaagcttttgcattagatgatattgaaataagagattttgatattaaaaatgatttacaaaagcaagatattgcagacaacaaagcaagtatagataacgtaagaataaattcttttaaacctacattagaattttataatcaagttcaaataataagatattactatacttttaatgacatagatatagataggtataatataaatggaaaatacaatcaagtattcctagctgcaagagaaatagatacagatgcattaaatccaaatacatggcaaaatagacacttaatatatacacatggttttggagcagttatgaataaagtaaattctgtaacaagtgaaggacaacctgactttgttataaaagatataccaccttataataaaacaaatataaaattgactaatcctaggatatattttggagaaaaaactaatgactatgttatagtaaacactaagataaatgaatttgattatcctagagaagattctaataaaactaataaatataatggacatgcaggtataaaaatgagctttattaatagattattatttgctataaataaaaaagatattaattttcttttatcaaaggatataaaaaaagatagtaaaataataataaatagaaatattgtagagagggcaaaaaaaatagcaccctttttaacttatgatagtgatccttatatggttatatataatggcaaaatatattggataatagatgcttatactactacaaatagatatccttattcagagccttacgatagtataaattatataaggaattcagctaaagtagtaatagattctgtagatggagataccaatttttatattacagataaaaaggatcctatagttaataattatgctaaaatatttaagggattatttaaagaagaaaaagatgcgcctaaagaaataagagaacattttagatatccaaaagatttatttagtattcaaagcaaagtattaggaaaatatcatgtaaaagatcctggtgtgttttataatggtgaagatctatgggaagtgtctaaggatcaaaaacatgttgaaggagaaacaaatacaaatgatgctccttatataattatgaaattaccagaccaaaataaagaagaaatggtacttttgaattattttaatgtaatgaaaaaggataatatgatagctttatttggagcaagaatggatggagagcaatatggtaaaaaaatattatataaacttccatcagacaaaacagtatatagtccatatttatttaagcaaaaaataaatcaagatactaatatatctaaggaattatcattatggaatagagaaggttcaaaggtgcaatatggagacactataatattacctataaaaaattctcttctttatatagaaccactatatttgcgggctagtgggaaaaatagtataccagaaatgaaaagagtaatattatcctataatgataaattagttttatcatctagtattcaagaaggtataaaagaaatatttaattctaaagataataaaatcaatgataaaaatgaaaaagatagtacaaagactatagatgattcaaaattgaaaaaagctcaagaatattataataaagccatagaagctcaaaaaaatggagactggactaaatatggagaaaatataaatgaattaggtaatatattaaatagtataaaataa

SEQ ID NO: 912 - DNA, 777 bp, Clostridium botulinum
  source 1..777: mol_type = unassigned DNA
ttgaaatttaaaaaaagcgtatatattgttgtatttactttaatattattatttataccttgctttatacatacaaaaaaagatgtaagcacaactaataatttagacaataaaacaaaagaaataaataaaagtgaagtggatagaaatgaaatgtcagtattttcatctaatacttgttttaaaaaaacttattatataaataaaaataaagtaccagtatataaaaattttgattgtaatagcgaagtattatattatttatatgaagatgatataattgttagctataaggagcaaaatggatatatattttgtgaagaaggaaatttaggaagaaaaggatggattaaaaaaaataaagaaaatcttaaaggaattttacataaaaatactgaatataaagtagatgtggacttaatagatcaaaagataagggtatacaaaaatgataaaataataaaaaatatcaaatgctcaacaggagttataggaaaacaagatacagaaactccattaggtattttttatattacaaataagggaaaatatttttatagtaacaaatataatcaaggtggtagatattatattaaattttttgcaaattatttaattcattctatacctgtagacaagaatggtaatataatagaagaagaaaaagacaaattaggatttcctacatctcatggatgtataagagtacctatggaggattcaaagtggttatatagaaatatacctaataaatctttgataattatacattattaa

SEQ ID NO: 913 - DNA, 1398 bp, Clostridium botulinum
  source 1..1398: mol_type = unassigned DNA
atggattatgatgtgatgatattaggtgggggaataatcggatgtgcattagcttatgaattatcaaaatatagtttaaatatagctttaatagaaaaggattatgatatagcagatgatgtagcatttataaattcatctgtagtgtatgatggagtggaatgtgaagatgatttagcagctaatttggagttaaatggtaataaattaatggaagatatagctaaaaaatttaaaattccatttaaaaaaacagggtcattaataatagctcaaaatgataatgaagtatacaatatagaaaatatgtataaaaaagctttaaaaagaggaataaaaaatatagaagtattaactaaggatgaggtagaaaaaatagaaccaaatttaaatatagattttaaaaaggcattatattctagcaatacagcatctatagcaccttttgatctagctatatcttatggagaaattgcctttgataatggggtaaattttaaattagaagaacaggttttagaaatacaaaaattatctaaaggatataaaattataactaataaaaacaaatttaactgtaatatagttataaatacaacccctgatgaaaattttggaatatattcagacaccaaaagaaattataaaaaaagtaatttaaattatttattaatagaaaaaaattcaattaaggaatttaataatatagtggtaaagctaggtaataatgaaaatataaaaaaaattttagctgtaccaactgttcaaggtagtatggttttagctgtagatacttatgagaagataaattataaaaatacattagatgtgtctgctttgattttagatgaaataaatgagatggatataaataatttttatcaatttccatattatgatgatagcatagtaatagatgatagtttaatagataagggatatataaaagttatagtcaatcattatggacaagtaacgatgacaccttatatagccaagactgttacagaaactatagttagtaatataaaatgtgtactaaagaaagagtttatagataaaagaagggattattataaatttaatgagttatctttagaagaaagaaataaaattataaatatggacaaaaggtatggaaaaataatatgtgcctgcaataaagtaacagaaggagaaattatagatgcaataagaaggcctttaggtgcacgaacattagagggaataaaaagaaggacaggagcagcttttggtagttgtcagggagcctattgtttaaataaagttgtatcgatattagctagagaaacaaataaatttatgacagatatagttaaggactcaaaaaattctaaaattataccctgtagaattaaagaatttgatacaatttaa

SEQ ID NO: 914 - DNA, 354 bp, Clostridium botulinum
  source 1..354: mol_type = unassigned DNA
gtgcttagagaatttatttgtaatggatgcaataaaaaatgtataatatctctttataatagtaattataatactataaaaggtaaccaatgtaacttaggaatagattatgctaaaaattatgttaataatactaaagatatttttactacgttagttaggataaaaggatctaaatataatgtattaccagtaaaaagcagtgaacctatagaaaaatctttatggatagagtgttctaaagctttaagcagattatatgtaggttatcctatagaaattggagatgtaatttgtaaaaatattttgaacacaggagtagatataatagctattaaaaatattaatgaataa

SEQ ID NO: 915 - DNA, 1281 bp, Clostridium botulinum
  source 1..1281: mol_type = unassigned DNA
atgttagatttaaaaagaataagaaataattcaaatgaaataaaagaagcattaaacaatagaggagaaaagtttgatgtaactgtaattgatgaagttttaaaattagatgaagaaagaagaaatattttagttaaagttgaggttttaaaaagtaagagaaatcaagtttcttctgaagttcctaaattaaaaaaagaaggaaaagatgtatctaatatagtagctgaaatgaagaatttatcagaagagataaaaggatttgatgctactttagctaaaatagatgaaaaaatacaatatataatgcttagaatacctaatataccaaacccacaagttccagatggtgaaacagatgaggataatatagaaataagaaattggctggaaccaacaaaatttgattttgaacctaaagcacattgggatataggaacaaatttaaatattcttgattttgaaagagctggaaaagtaacaggatcaagatttactttttataaaggattaggggctagattagaaagagcagtaatatcttattttttagatactcatacagaaaaacatggttatactgaaatattaccaccttatatggtaaatagaacaagtatgataggaacaggacaattacctaaatttgaagaagacgcttttaaaatctcagaggatgattacttcttaataccaactgcagaggttcctgtaactaatttatatagagatgaaatcttaaaaggtgatgaattaccattaaaacatgtagcttatagtgcttgttttagatcagaagcaggttcagcaggtagagatacaagaggtcttgttagacaacatcaatttaataaagtagagcttgttaaatttacaaaaccagaacaatcctatgaagaattggaaaaattaactaatgatgctgaaacagtattaaaagagttgggtattccatatagagttgtaagaatatgcaaaggtgatttaggatttacagctgcattaaaatatgatttagaagtttggatgccaagttacaatagatatgttgaaatatcaagctgtagtaactttgaagacttccaagcaagacgtgctaatataagatataaagaagatgcaaaagcaaaaccacaatatgttcatacattaaatggatcaggagttgctattggaagaactgttgcagctatacttgaaaactatcaaagtgaagatggatcagttacaataccagaagtgttaagaccttatatgggaggaagagaagtaataaaataa

SEQ ID NO: 916 - DNA, 888 bp, Clostridium botulinum
  source 1..888: mol_type = unassigned DNA
atgataaaatattacaatagaaaaactaacgattatgatatagaaaaagttgcaggtgaaaaatatttaaattggacttattcatcacctattggtatgaatcttttagaagtttttataaaaaagaagtttttttcaaaaatatatggattttattgtgatagaaagttaagtagtaaaaaaataaataaatttattaatgattttgaaattgatatgtctttaagtgagaatcaatcaagtaaatttaaatgctttaatgatttttttactagaaaattaaaaaaagaagctagacctataaaagctgataaaaatattttaatatccccaggtgatggtaaaatacttgcatataaaaatttaaatctaaattcagtaactgaagtaaaaggaatcaattatagtttttatgaattaataaataatgattcattagcaaaagaatatgacaatggaacttgcttagttttaagattatgtcccacagactatcatagatttcattttatagacaatggtacctgtgaaaatactataaagctagatggtttttactattcagtaaatccaattgcattatctaaaattcctagtttattttgcaaaaacaaaagagagtatgctatttttcatagtgaaaactttggtgatgtaatatttatggaagttggagcaacctgtgtaggttctataatacagacttataaacctaatactaaaattttaaaaggtgatgaaaaaggttattttaaatttggaggatctacagtaattttattcttcaaaaaaaatactataaaaattgataatgatatattaaatcaaagtaaattaggatatgaaacatctgttataatgggagaacctattgggagcaaaaaataa

SEQ ID NO: 917 - DNA, 1599 bp, Clostridium botulinum
  source 1..1599: mol_type = unassigned DNA
atgtacttaaattctgttcaaagatttaaagaaataataaaaatattagcattctatggttttggtcatatagtagattcaaaatttaacgaagataaagctcctgaaaatttaagaaaagcttttgaggaattaggacctacctttataaaaataggccaaatattaagcacaagacctgatatattatcagcgccctatataaaagaattatcaaaacttcaagacagtgtacctgaagataattttagtgatataaacaaaatattttttgaagaatttaatatatccatagaagatgctttcttaaattttaatagaaaacctttagcttctgcttctatatcccaagtttattctgctaaacttcataataatgaggaagttatagtaaaaattcaaaggccagaaataaaagaaaaaatgaacatggatttagctatattaagaaaaatatttactcttggaaaaattaaaacctttgatacattaatagatcctaaagaagctatagatgagctaataaatgcaactaatttagaattagattttaataatgaaaaagaaaatattaaaaaatttaaatactttaataaaaatctaaaatgtatttatgttcctaatactatagataaatactgtagtagcaagataattactatggaaaaaattcatggttttaagataaccgatacaaaatctttagataaattaaattatgataaaaaagatgtagctcataaattagctatatctatattaaaacaaatttttgaagatggattttttcatggtgatcctcatcctggaaatatttttatatatgaaggtaaaatatgttatatagattttggaataatgggtactctatcgtctgatctaaaaaattatttaaataaggctatggtagctgtggcttttaaagatgtagataaacttatatctgtacttttgtctattggtataaaaaaaggttatataaataaaaataatttatttgaagatataaattatttatttgatatttatctttctactcctttaaagaatataaaaatgtccaccatgcttcaagaagtctttgaatgtgctaatcgtaataatattagtttacctaaagaattgactatgctcataagaagcttaattataatagaaggtatcttagaaaaaatagatcctaatattcaaatattagatattgcgattccctatgtagaaaataataataaagttaatttttttaaaaatattgatttggacgaattaatattaaatagttataaaactgcagaagatttatcaaaaattcctactaaaactgttcaactattaaatagtattttaaatggtagatcaaaaattcaacttaatgtcaataatctagatagatcaattaatgaattaaacaaaatgataaacagaatagtttttgctttaataatatcctcaatgataattggtttctcttttatacttaattctaacattggtcctaaattttatgatatatctataataggaatattaggatacctcattgcagcctttatgggtttttggcttcttatatctataataaaatctggtaaattataa

SEQ ID NO: 918 - DNA, 321 bp, Clostridium botulinum
  source 1..321: mol_type = unassigned DNA
gtgataaacgaatttaaaaatatacttttagctggtattggttcagcggcttatacctatgaaaaagcctctaatttagtagacgaaatggttcaaaagggtaaaattactgtaaatgaaggtaaggaattatctgaagaactaaaaagaactattgatgaaaataaaaagtctaaaaattcatctgaagaaaaacagcttacaagagaagatataatttctatatttaatgaattaaattttgttaataaaaatgatttaaatgatataaacaataaaataaaatcacttgaagataaaatttctcaattagaaaaataa

SEQ ID NO: 919 - DNA, 1551 bp, Clostridium botulinum
  source 1..1551: mol_type = unassigned DNA
atgaaattagaaataataacagaagatcgtttaggcatggtgctagatattttaaatgtgttatacaatgagagtatggatataaaatctctagaggtatttcctaaaaaaatatatataaaaataaataaaaagatttcttacaacaaaaacatgataatcaagaaaataaaaaatataaagggagtagtaagggtaaaaaagatagatatactaccttatgaaaaggatgaaaaaaaattgtttactataattgattctttggaggagggagtaatttttgtcaatgaaaaatgtcaagtagaggtttttaataaatactgtgaaaacttatttaatactttaaaagaaaatgcaattagaaagcatataaaagaaattttcggacaaaatcaactcatattagatgctttaaaaatgggaaaagattatgataatttacaagtcttcattaataataaagatagaaagggaatgtatgtatctacagcaagagctattaaagatgataagaataaaacaataggatttgttatattaataaaagatttaaaagaaactattgaaatagtaaattctattaaatataaggaagatgaagcatttaaggggataataggaaaaagtatctgtattgataatttaaaagaaatatgtaaatcagttgctaaaacaaattcaaccgtattaatttgtggagaatctggaacaggaaaagaactttttgcaaaagctatttataaattaagcttgagaaataataaaaactttgttactgtaaattgtgctggtttacaggataatttaatagaaagtgaacttttcggttatgaagcaggaagttttacaggagctaaatctaatggtaaagaaggtttttttaagttagcggataaaggtactatatttttagatgaaattggagaacttcctcttaatattcaatgtaaatttttaagagtattacaagaaggaactataagaaaaataggaagtacaaaggaagaaaaaatagatgtgagaataattgctgctactaataaaaatttagaagaaatggtttcaaacggaaaatttagagaagacttatactatagattaaatgtagtacctatagaaatacctccactaagagaaagaaaagaagatatacaattattagtagataattttgtaaaagctttaaataaaagtttaaataaaaatattaggtatatagataaaaaatttataaataaattattaaaatataatttcccaggtaatattagggaacttcaaaatataattgaaagaactatgaatttgtgttcggacaatatattaagtgataaaaatctcagtataaatactaatattacattaaataatgataaaaataatgatagtggtgcattacttttacaagatatagtggagaaagcagaaaaatgtgctatacagaaggtaatgaatgaatataaaagtttaagaaaagtaggcaaagtattaggagtttctcatactactgtaatgaataaaataaaaaaatatggaattgtatgtaaataa

SEQ ID NO: 920 - DNA, 1203 bp, Clostridium botulinum
  source 1..1203: mol_type = unassigned DNA
atggaaaatataaagaaaatgggatttgcgacaaaggctatacatggagggctcattggagataaacagtttggttcattggcaactccaatataccaaacatctacattcatatttgattcagcagagcaagggggtaggcgatttgcaggagaagaaagtggatatatatattcaagattaggaaatcctacatctacagaagtagagaacaagttagctttgttggaatgtggagaggcagctgttgtagctgcctcaggtatgggtgctatagctgcatctttgtggtcagctttaaaatcaggagatcatgtagttgcatcagatactttatatggatgcacatttgcactattaaatcatggattaacaagatatggagtagaggtcacatttgtagacgtatctaatttagatgaagtaagaaatgcattgaaagcaaatactaaagtagtttatttagaaactccagctaatccaacattaaaggttactgatattaaacaaatatcaaatatggttcatgaaaataataaagaatgtcttgtatttgttgataatacattttgtacaccatacatacaaaggccattacaattaggcgctgatgtagttgtacattctgctactaaatatttaaatgggcatggagatgttatagctggatttgcagtaggaaaagaggaatttataaatcaagttaaattatttggtataaaagacatgacaggatcagttataggaccttttgaggcatttttaataataagaggaatgaaaacattacaattaaggatggaaaaacattgtaagaatgctatggaagtatcaaagtttttagagtcccatcctgcagttaaaaaagtttattatccaggattagaaagttttgaatactatgagcttgctaaaaagcaaatgagtttgcctggtgctatgatttcttttgaactaaaaggtggagtagaagaaggtaaagtagttatgaataatgttaaattagctactcttgcagtaagtcttggggatgctgaaacattaattcaacatccagcatcaatgacacattcaccttatacagcagaagaaagaaaagaagctggtataagtgatgggctagtaagactatccgtaggacttgaagatgtgggtgatataattagtgatttaaaacaagcattagatttaatagttaagtaa

SEQ ID NO: 921 - DNA, 438 bp, Clostridium botulinum
  source 1..438: mol_type = unassigned DNA
atgaatgattatatagaatatgcaataattgaagcaaaaaaagcattagcaataggagaagtacctgttggagctattatagttaaagaaaataaaattatagcaaaaagtcataatttaaaagagtcattgaaggatccaacagctcatgcagagatattagctataaaagaagcttgtaatacaatacataattggagattaaaaggatgtaagatgtatgtaacattagaaccatgtgctatgtgtgctagtgcaataattcaatctagaataagtgaattgcatataggaacctttgatccagtgggaggggcttgtgggtcagtagtaaatataacaaataatagttatttaaaaaataatttaaatattaaatggttatatgatgatgaatgtagtagaataataacaaatttttttaaaaatattagataa

SEQ ID NO: 922 - DNA, 1626 bp, Clostridium botulinum
  source 1..1626: mol_type = unassigned DNA
gtgggttataccgcattatatagagagtggagaccaagaacatttaaagaggtagttggacaaaaacatataacagtaacacttaaaaatcaagttatagaaaaaagaatagctcatgcttatcttttttgtggaacaagaggtacaggtaagacatctacagcaaaaatactatcaaaagcagtaaattgtttaaatcccaaggatggtgaaccttgtaacgaatgtgaaatttgtaataaaataaatagtggaactttaatggatgtaatagaaatggatgctgcttctaaaaggaaattagaggacataaaggaagttatagaaaatgtaaaatatccaccacaggaagggaaaaataaggtttatataatggatgaggttcatatgttaactcaagaggcagtaaatgcttttttgaaaactttagaagaacctccgagcaatgtaatattcatattagcaactacagatcctcaaaaattacctataactatattatctagatgtcaacgatttgattttagaagaataagaaatgaggaaatatttgaaaggcttagagcaatagtgtcagaacagggcatatatgcagatgataaaagtcttaatcttatagctagaatgtcagatggggccatgagagatgctcttagtatattagatcaagttatatctactggagatgggaaggtagagtatgatcaagtcttagatatgctaggattagttactaatgaaaatcttctaagaattacaaacagcataatagaaaaagatgtagagaaatctatgaggataatagaagatatagtgctaagtggaaaagacatatataattttataaaagatatgataactcatcttagaaatatacttatggttaaagtaagcaaaaatccaaatgaaatattagatatgtccagtgaaaatattgatttagtaaaagagcaatctgaaaaaataagaatagaagaaataatgagggatataaaaatacttcaagaagcagaacaacaatccaaatgggtaaagcaaaacagaatatatttagaattggctgtacttaaaatgtgtaaaatagaatatgatacatctaaagaagttatactttctaggcttaataaaatagaagagcttataaaatcaggtaatataaaattagcaataaatgaagaaaagaaaaaaatagagccaaaggaatttaatctaaaaagagaaaaagaaagtatacaacatagtaaaatagaaaaaaattcattagaagattataataaggactctaaattaactgtagaaactgtcaaaaaaatgtggcgcgatatattagaagcttttaaagcaagaagacttatggtattatatgcagctttagttactgcaaacataacagattgcaaagaaggtattattactttaaattataataagcagtattcttttaataaaaagagattagaaaagccagaaaataataaagtagttcaggaaattttttctgaggtactaaaagagaaaattagaataatatatattgtagaggaaaaggctaaagaagaaaatttaccagaagagattttaaaaaatacttttggagagaatatactagaaataattgatgaatag

SEQ ID NO: 923 - DNA, 342 bp, Clostridium botulinum
  source 1..342: mol_type = unassigned DNA
atggcaagaggtggattccctaacatgggtggagcaaatatgaataacttaatgaaacaggctcaaaagcttcaacaagatatggaaaaaatgcagggagaaatggaaaagaaagaattttcagctacagttggaggaggagcagttacagctgttgctaatgggaaaaaacaaatagtagatataaaaattgaaccagaagttgtagatgaagatgacatagaaatgcttgaagatctaataatgagtgcatgcaacgaagctttaaagaaagctgaagaagacacttcaagcgaagtgaaaagattaactggaggaatgaacttaccaggaatgttctaa

SEQ ID NO: 924 - DNA, 597 bp, Clostridium botulinum
  source 1..597: mol_type = unassigned DNA
ttggatttttatcctatagctatagaaaaattaatagaagagttcgctaaattaccgggtataggttataaaacagctcaaagacttactctatatgtactaaatttacctaaagaagaggtaaaggaattctcagaggccttagtaaaagctagaggtacaattaaatattgttctgtatgtggtaattttacagataaagatccttgtgctatatgtagtaatcctaataggaataaatctattatttgtgtaatagaacaacctaaagatataatgtctatggaaaaaataagagaatataatggagtatatcatgtattacatgggaatatatctcctatggcaggaagaggtcctgaagacataaaattaaaagaattaataagaagaatagatggtagtgtaaatgaagttatagttgctactaatcctaatgtagaaggagaagcaacagctatgtatatatctaaaatattaaaacctctaggagttaaagttacaagaattgcccacggagtaccagtaggtggggatttagaatatgcagatgaggttactttagctaaagctttagaaggaagaatagaattataa

SEQ ID NO: 925 - DNA, 264 bp, Clostridium botulinum
  source 1..264: mol_type = unassigned DNA
atgggaggtttttttataatgaaaaaattaaatgatggaaaaaatgaaaaaaagttattactagaatctatagacagcgtaatatcagagataaacaacataagaagattgtttgaaaacgcaagtgatcctaaattaattgattatgctatatacatggaagaggcactaaaagctaaatatatttatctcttaaaagaagctaaagaagaaggtattaaggtagaatattgtgatacaataaaagaagttgaagtaggataa

SEQ ID NO: 926 - DNA, 261 bp, Clostridium botulinum
  source 1..261: mol_type = unassigned DNA
atgggaatagaatatattgcttattttattttagctatatttttgttgtttgtagtagtaaaaatattttcatggccattaaaaatcctcttaagtttaataggaaatgccattttaggaacagtattgttatttattttaaatgtgattggaggagcttttaatttttacataggtataaatatatggacagcattaatagcaggattctttggaataccaggagttatatttcttataatatttaaattatttttatag

SEQ ID NO: 927 - DNA, 693 bp, Clostridium botulinum
  source 1..693: mol_type = unassigned DNA
ttgaaaataactaaaaatatactaaaagctgaatttataaaaaggccaaatagatttcaggcttatgtaaaaataaatgagaaaatagaaatggttcatgttcctaatacaggaagatgcaaagagatattgattccaggttctacggtcatattgagagaagaaaataatgaaaatagaaaaactcgatatgatttaatagctggatataagggagatatgcttataagtatagattcccaaatacctaataaggtagtctatgaagcattaatgaactttaaaatagaaattcttaaagagtatactaatattaaaagggaaaaaacctttggtaaaagtagatttgattttagattagaaaaagaaaatggagaagtatattatttagaagtaaaaggagtaactcttgaaaatgatggtttaactatgtttccagatgctcctacagaaagaggaacaaaacatatattagaacttatagatgtgaaaaataaaggtatgggtgcaggtgtgctatttttaatacaattaaatggtgtaaaaaaatttacaccaaactataaaatggataagaattttggagaagctttaaggttagcaaaagaaaagggtgtagatattttagcctatgattgtttagttgaggagagtagtatttctttaaataatcctgtatcaatagaaatctag

SEQ ID NO: 928 - DNA, 489 bp, Clostridium botulinum
  source 1..489: mol_type = unassigned DNA
atgaaatttaaatactgtccactatgtggggaaaaattaattgaaaaatacagctgggatgaagggggagttccatactgtaaaagacataatataatgtattttgatacccctaaaccttgtattgtagtaggtgtacttaaagaagatcatgttttattattaaagcaaagctatatattcaaaaattctaaagttcttttatcaggatatgtatctagtggagagaccgttgaagaagctgttcacagagaagttaaagaagaagctggtattaatataagagatttaaaatatctaggaagtgattatctagagagtaaagatatagtcatgattacatttatggcaacatatagagatggaattttaaacaaatcagaagaagtagaatggattgattggatacctataaaagaagccatagatcatatggaagaagatgaaatagggaaaaaaataataaaaaaaataatgaagaattgttaa

SEQ ID NO: 929 - DNA, 723 bp, Clostridium botulinum
  source 1..723: mol_type = unassigned DNA
atgagtaacaaaattgaaaaaacacctaaacgtgtaccagaaataaaaggtgtgttaagaagtcatatgatagaagttccttcaattattagagaagctagtggcattaaagtttttgggaaaagaataaaatcctttgtatacagcacagatgttgctgttattaaaaataccaatgcagatgctgtaatagcagtatatccttttactcctcagcctataataactcaatctttagttttagctgcagatattcctgtattttgtggtgtaggaggaggattaactactggaaaacgagttgttaatttagctttagatgctgaatttaaaggtgctatgggagttgttataaataatccaactcctaatgatgtattacagcaaataaaagatactatagatattccaattgtagtaacggttgtatcggagtatgaagacatagaagctagaattaattcaggagccactatactgaatatatcaggagctaaaaagacagcgtacatagttagagaaataagaaaacgatatcctgatttccctataatagctacaggaggtccaaatgaagccagtataaaagaaaccatagaagcaggtgcaaatgctataacatatacaccacctccagcatcagacatatttagtgaagttatggataaatatagagttaactttaaaaaggaacatgatagagaagaaaatgaacaatcctaa

SEQ ID NO: 930 - DNA, 789 bp, Clostridium botulinum
  source 1..789: mol_type = unassigned DNA
atgaatggcatactattttactttagtggaacaggtaataccaaatgggtagcagatagaataggagataaattgtgtaaattagataatactatacataaagttaatatagagaatcttgatgatgatgtattaattaaaattcataattatgattttataataataggaacacctatttatgctgagatgggtccaaaattaatacaggattttgttaataatattcctaaagtaaaagaaaaaattaaatgtatactatattcaactcaaggaggcaattcaggttgtgaaacagagagtatgcataaaatcttatgtaataaaggttatgatgtagttataaaggttaatataaaaatgataaataattattatttttctgtagggaaaaagccagatgaagctgagatggcaaatatactaagggatgcagaaaaaaaggtggatttagttgtagataaattttcaaaaggagaagtatatttagaaaatataagtaaaactagagtatttttggggaaaattgcatctaagggatttaataaatttcttcctaaattatcaaacaatcttaaatctacagagcattgtattaaatgtggtatgtgtgttaggaattgtccaaaaggaaatatagtatttgagaacgggggagtagtttttcatagtaattgtatattatgtttaagatgtatatatatatgtccaagcaatgcaatagtttataaagaaaagagaatagatcaaatagaaaaaaatataataaaattattggacataaaatag

SEQ ID NO: 931 - DNA, 162 bp, Clostridium botulinum
  source 1..162: mol_type = unassigned DNA
atgaatataaataatgataattgtagtaaatgtataaatatattaaaaagtaattgtaatggtaatttagaaaattgtatttgccaaaagtgtgttagaaatatagaaaagtgtataattactaagtattgttcagaaacagaatctacattgagtatataa

SEQ ID NO: 932 - DNA, 705 bp, Clostridium botulinum
  source 1..705: mol_type = unassigned DNA
atggagaactggttacaaagaactgaatttttaataggaaaagaggctatagaaaaattaaacaaaagtaaaattgtggttttaggtgttggaggagttggaagttttgtaatagaagcattagttagatctggagtaggtaatataacaattgttgataatgatacaatagatataactaatataaacaggcaaatccacgctaatttaaatactgttggaaaatctaaagttgaggtaatgaaagagagaatactatctataaatcctaattgtaatgttaaaatccatgaagaatttataaataaagataatataagtgaattagtggctaaagatacagattatgttgtggatgctatagatacggcttcttctaaaatattaagtatagtatggtgtgataagaataatataaacataataagtagtatgggtacagcaaataaattgcaccctaccaaattaagaatagctgatatatatgatactaaagtatgtccattagctaagattatgagatatgaacttagaaagaggaatataaaaagtttgaaggttttatattcagaagaaactccaataaaaaataataatagaccattaaacgataaaggtaggccaacgccagctagtatagcttttgtcccaccatgcgctggtcttataatagcaggagaggtagtaagagatataattaaataa

SEQ ID NO: 933 - DNA, 1110 bp, Clostridium botulinum
  source 1..1110: mol_type = unassigned DNA
atgatattagtagcagtttgtgatagtacaagagggatctttatccccatatttaaaaatgagtttaatataaataatactaaaataggattgatgattactataagtacattgggatacacagtatttacatacttaggtggcatattgtgccaaaagaaagggcagaagagggtttattctataggacttttaataataagtatatctttcttactattaaattttacgcctaattatataattcttattattttaatgtttttaataaacggaggccaagctttcttagctatatctagtaatacaataatacctataatttttataagttttcaggctataataatgaatttagctcattttaattatggaatgggattagctttatcacaaaggatttctggtatgcttttgtatagaggtataacttggagaaggatatacctttatttatcaattataactttcatagtgtatctattgttattttttattaatatacctgtgattaataagtcaaaagacgataataaattaaagtcgaaagaaatttttaaagataagttattatatttttatatatttgcattaggattttatgtatttagcgaaatagctacaggaaattggttcgttaatttaatggagaatggatacagatataataaaaatcaaagttcatattatatatttttattttcagctttatttgcattagggagattattagggggatttttagtagaaaaattcaactatataaaggccgtatgcacatctttggctgtggctttaatgatgtatactataggtataacattagggcaaaaggggctaattttaatatcattatctggaatatttttttctatagtatatcctacagtagtattaactattagcaaagtatattccactaatagttcttatgtgacgggaatagtagtaaccttatcttcttttgtaaatatgattataagttttttaatgggatatttaaatgatttaataggtatttatacatcatattatcttattcctataagtttatttatttctttaatgtttatgtttttaatacacaaaaatataaaaaaattagcttaa

SEQ ID NO: 934 - DNA, 945 bp, Clostridium botulinum
  source 1..945: mol_type = unassigned DNA
atgaacaataaatttaaggtaagcatagaattagctaaaggtacagtggatgaatatatagttaaagatattacaggtataagtataggtagaatattcatattagagttatctaaaaaaaataaatatggttgttttagattaaatctttatagagatggtgaaaattcaaatatttatttaaattatatattaaaagattttttacaatatttattttataaaaaagaagtttgtaaaataaatattataataaatgaaaatatgaatacaaatgtttttatagaatatggattttatttagaaggaattataaatgatagtagattaatagatggtataaaaactagtgaatttttatttggattagatatagatacttttaggaaagctaatttgtataaagaattaagtatagaagggaaaaatataagcttaaagctattgacgcctataaatgcacaagaattattagattattatataagaaatgaaaggcatctaaaaagctatgaacccacacgagataaaactttttatactttaaaagagcaaagggatttattaatggattcatataaacaatatttaaatggaaatagtttagaacttggtatatataaagataaaaaatttataggtaaaataaagatatcaaatataataatgggcatatttaaaaattgtattgtaggatattcaatagacaaagatttccaaggaaatggatatatgaaggaagcacttaaattattgatagattatacatttaatgaaattgatatacatagaatagaagcttcaactttaatagataatattagatctcaaaaagtattggaagggtgcggatttaaaaagctaggtataaatgaaaaatacttatatatagatggaaaatggcaagatcatgttacttattatatagtaaataataatatataa

SEQ ID NO: 935-950 - skipped (16 entries)

SEQ ID NO: 951 - protein, 445 aa, Clostridium botulinum
MSTHLTETWEKAINIIKGELTEVSFNTWIKSINPISLENNSLKLAVPNDFTKGILESRYKDLIVNALKLLTSKKYNIDFIVTTEEKIEKNHNNEKSNIVVNDEMSTMLNPKYTFDSFVIGNSNRFAHAASLAVAESPAKAYNPLFIYGGVGLGKTHLMHAIGHYILHNNPKSQVVYVSSEKFTNELINSIKDDKNVEFRNKYRNIDILLVDDIQFIAGKERTQEEFFHTFNALYEANKQIIISSDRPPKEIPTLEDRLRSRFEWGLIADIQAPDFETRMAILKKKADVEKLNIPNEVMVYIATKIKSNIRELEGALIRIVAFSSLTNKEISVDLASEALKDIISSKQTRQVTIDIIQEVVANYYNLKIEDLKSARRTRNIAFPRQIAMYLSRKLTDMSLPKIGEEFGGRDHTTVIHAYEKISNNLKKDESLQNAINELNKRINQK

SEQ ID NO: 952 - protein, 367 aa, Clostridium botulinum
MKITCQKNILLEGISIVQKAVTGKSTLPILSGILIRANKNELVLTGSDMDLSIETKVKANILEEGTIVLDARLFGEIIRKLPNDLIEINTLEDNSIEIICQNSRFNLIYMNPDEFPNPPIINENMIFSIGENKLKNMIKGTIFATAQDETRPILTGVLFQIKDKMLNLVALDGYRLALRSEIVDNDNTINAVIPGKTLNEVSKILEEDDENVNITFTPNHILFSIGETKIISRLLEGEFISYKSIIPEEYNLKIIAKRLELLNSIERASLMAKEGNTNLVKFDFSNDKIVITSNSQLGMVREELKVVLQGEDLQIAFNSKYLLDVLKTMEGDEVVLEFSSSVSPCIIKNTELNNCTYLVLPVRLNNN

SEQ ID NO: 953 - protein, 68 aa, Clostridium botulinum
MIEVKINSEVIKLDSFLKWSGATTLGSEAKFFIQNGEVKVNGEIEKRRGRKLKIGDLIEFNNETYKII

SEQ ID NO: 954 - protein, 364 aa, Clostridium botulinum
MYIKNVHLINFRNYDDMYLELSPNTNIFVGNNAQGKTNILESIYYSSIGKSHRTNKDKDLIKWDKNNTYLRTYVSRERLDKTIDINIFKNGKKAITVNKIKIKKISELMGNLNVVMFSPEDLRIIKDSPGNRRKFLDIELCKINNVYYHDLVQYNKILSERNTALKNWNNKINDIIDVYDEQLSKYGAFIIKERNKYLDKLNIIGKNIHNKITNDLEDINFRYLTNIKDFDNAEKELLMLFKKNRKKDLERNSTSIGPHRDDFEVSINNIDTRIFGSQGQQRTAVLTLKFASLEIIKNIIGEYPVLLLDDVLSELDSNRQKFVLNSIDKIQTIITCTGIEEIDKYLDKKQSQLYLVNNGKIKRV

SEQ ID NO: 955 - protein, 87 aa, Clostridium botulinum
MFLHLGENVVVPIKDVIGIFDMETSMYSSDTIQFLRLAEEDGFVERITKEKPKSFVIAEVDKKSKIYLSPISSATLTKRTKVLYNEL

SEQ ID NO: 956 - protein, 637 aa, Clostridium botulinum
MSQENKQVYDESQIQVLEGLEAVRKRPGMYIGSTSLRGLHHLVYEIVDNSIDEALAGFCTHIEVFIHKDNSITVVDDGRGMPVGMHSKVKKPAVEVIMTILHAGGKFGGGGYKVSGGLHGVGASVVNALSEQCEVEVRREGHIWKQKFERGITKTGLDIVGDTEDHGTKIYFKPDIEIFDELEFEYDTLAHRLRELAFLNKGIKISLTDERYDKKEMFHYEGGLRSFVLYLNRNKEKLHQQPIYVDENKDGCIVEIAMQYNDGYAENIFSFANNIDTIEGGTHLAGFKSALTRVINDYARKFNYLKDTDKNLSGDDVREGLTAVISVKLTDPQFEGQTKTKLGNGEVRGIVDTIVGQSIGSFLEENPNVGKIIIEKGLSASRAREAAKRARELTRRKSILESTSLPGKLSDCSSKDPSLCEIYLVEGDSAGGSAKQGRNREFQAILPLKGKIMNVEKQRLDKILASDEIRAMITAFGAGIGKEFDIDKIRYNRIIIMTDADVDGAHIRTLLLTFFYRYMKELIEEGHVYIAQPPLYRIYKAKKEIYVYSDPELDAALLELGGKDTNTNIQRYKGLGEMNPEQLWETTMDPEHRTLLQVTVEDAMEADEIFTILMGTKVEPRRDFIESNADKVVNLDI

SEQ ID NO: 957 - protein, 821 aa, Clostridium botulinum
MLNEGKILPVDVSKEMKKCYIDYAMSVIAGRALPDVRDGLKPVHRRIIYSMQGLGLAPEKGYRKCARIVGDVLGKYHPHGDTAVYEALVRMAQNFSIRYTLVDGHGNFGSVDGDGAAAMRYTEAKMSKISMELIKDINKNTVDFIPNFDGEEEEPSVLPSRFPNLLVNGSSGIAVGMATNIPPHNLTEVIDGIIMLIENEDVNILDLMTKIKGPDFPTSGLIVGTRGIREAYETGRGKVIIRAKAEIEEEKGKNKIIVTEIPYQVNKARLIENMANLVKDKKINGISDLRDESDRDGMRIVIELKRDANPNIVLNQLYKHTKLQDTFGIIMLALVNNQPQILNLKEILVNYVEFQKEVIRRRTRFDLDKALARAHILEGLRIALDHIDEVIKLIRASKNTAEAKEGLMNNFNLSEKQAQAILDMKLQRLTGLEREKIEEEYKELMEKISYFREILDKEELVLSIIKEELIEIKNKYGDERKTEIVKGEHDIDIEDLIEDKKVIVTLTHGGYIKRLDMDTYSSQKRGGKGIQATSTKQDDFIENMFVTSTHSTILFFTNRGKVYKLKAYEIPEAGRTAKGTNIVNLIPIENNEKIQTVIGLKDIDDMKHFVMCTRNGIIKKTEISKYSSIRKGGLNAINLREDDELIDVKMTKGNDEIIVVTQNGYCIRFNEEDVRPMGRVATGVKAITLRKADKAVSMDVVIEDETLLSISENGFGKRTDIEEYPIHRRGGKGVITYKITDKTGPIVGARFVKEDDELMLVNSGDVAIRINVSEISKTSRNAMGVKLMRTSEEEKIVAIAKIKSEDIIEEEILNEENLNEE

SEQ ID NO: 958 - protein, 150 aa, Clostridium botulinum
MEYEDIVYINMHLDNEELKIFNKLSISEQKHSIKVAYDIEKLYEKGKYNLTKDEFIKVALLHDIGKLNYKVDIIKKSIIVIMDRITNSRIKKFQNIKSVYVHYNHPYLGYCILKQYNKYSEKMLYLIKNHHNENIINKELSLLIYSDNLN

SEQ ID NO: 959 - protein, 173 aa, Clostridium botulinum
MNSIERRKNIENMLMKNNKPIKGSEMGQKLGVTRQVIVKDIAILRASGKNIIATPEGYLIPNENKQLIRKIIAVCHDSKDIKDELEIIIKFGGIVEDVVVEHPIYGEIKAMLMIKSMYDIDNFIKNIQNNKAEPLLILTGGIHLHTISSDNEDIMNKIIEQLNQKNYLVDEEV

SEQ ID NO: 960 - protein, 387 aa, Clostridium botulinum
MDKVALLKCDEYDLEKVEKTIRNGFELLGGNSFLNKLIPYNSKVLLKPNMLSIENEGSPVVTNSVVFEAVIRILGDYSNNISFGDSPGFGDSKKAAEKSGLLNIAKKYNIEFKDFKESINVSCDNSILCRSWTVAKAAYETDVLITLPKLKTHAMAYFTGAVKNQFGCIPGTLKATWHTRMPNANNFCKMLLDLNTLLETDFAILDGIIAMEGNGPKNGTPYNLNTIIMGDSLTAVDSVAVKIIGYDNPLDIPVLKEAYDSNWGSVFLKDIDILGEKIDSMVVDNFKLCREGGDFYFINPKVTNFLKDIIAPDPTLIKEKCIGCNRCAEVCPEKPYVIDMIKKGDKKIPVWNMKKCIRCFCCQELCPKGAIETKYSFIGRFLNRDGR

SEQ ID NO: 961 - protein, 893 aa, Clostridium botulinum
MKNKKALFIPLFIIILFIAFFNKIINFIINIKWFKEVNYLAVYFTKMRAIIILMIPIFIIFFISIWMYYKSLIINKNKSVVDIGLNKNNYGKKLFFIFNFIVSIFLAYIFSSSYWYRILQFNNSVDFNVKDPIFFKDVSFYIFKLPLFESLYKVIISLLLFLVITTFIAYFILEAKYKIQSRKDINLKNINHGIKSFAGKQLAIVSGLIILFISFGHLIKIWNLVYSSNGVSFGASYTDVHATLLFYKIIVVITLISSIVTLLSIVKGKFKPVSICIGITIFLIVSQNIASFLVQNFIVKSNEKTLEQPYIKNNIDLTRKAFALDDIEIRDFDIKNDLQKQDIADNKASIDNVRINSFKPTLEFYNQVQIIRYYYTFNDIDIDRYNINGKYNQVFLAAREIDTDALNPNTWQNRHLIYTHGFGAVMNKVNSVTSEGQPDFVIKDIPPYNKTNIKLTNPRIYFGEKTNDYVIVNTKINEFDYPREDSNKTNKYNGHAGIKMSFINRLLFAINKKDINFLLSKDIKKDSKIIINRNIVERAKKIAPFLTYDSDPYMVIYNGKIYWIIDAYTTTNRYPYSEPYDSINYIRNSAKVVIDSVDGDTNFYITDKKDPIVNNYAKIFKGLFKEEKDAPKEIREHFRYPKDLFSIQSKVLGKYHVKDPGVFYNGEDLWEVSKDQKHVEGETNTNDAPYIIMKLPDQNKEEMVLLNYFNVMKKDNMIALFGARMDGEQYGKKILYKLPSDKTVYSPYLFKQKINQDTNISKELSLWNREGSKVQYGDTIILPIKNSLLYIEPLYLRASGKNSIPEMKRVILSYNDKLVLSSSIQEGIKEIFNSKDNKINDKNEKDSTKTIDDSKLKKAQEYYNKAIEAQKNGDWTKYGENINELGNILNSIK

SEQ ID NO: 962 - protein, 258 aa, Clostridium botulinum
MKFKKSVYIVVFTLILLFIPCFIHTKKDVSTTNNLDNKTKEINKSEVDRNEMSVFSSNTCFKKTYYINKNKVPVYKNFDCNSEVLYYLYEDDIIVSYKEQNGYIFCEEGNLGRKGWIKKNKENLKGILHKNTEYKVDVDLIDQKIRVYKNDKIIKNIKCSTGVIGKQDTETPLGIFYITNKGKYFYSNKYNQGGRYYIKFFANYLIHSIPVDKNGNIIEEEKDKLGFPTSHGCIRVPMEDSKWLYRNIPNKSLIIIHY

SEQ ID NO: 963 - protein, 465 aa, Clostridium botulinum
MDYDVMILGGGIIGCALAYELSKYSLNIALIEKDYDIADDVAFINSSVVYDGVECEDDLAANLELNGNKLMEDIAKKFKIPFKKTGSLIIAQNDNEVYNIENMYKKALKRGIKNIEVLTKDEVEKIEPNLNIDFKKALYSSNTASIAPFDLAISYGEIAFDNGVNFKLEEQVLEIQKLSKGYKIITNKNKFNCNIVINTTPDENFGIYSDTKRNYKKSNLNYLLIEKNSIKEFNNIVVKLGNNENIKKILAVPTVQGSMVLAVDTYEKINYKNTLDVSALILDEINEMDINNFYQFPYYDDSIVIDDSLIDKGYIKVIVNHYGQVTMTPYIAKTVTETIVSNIKCVLKKEFIDKRRDYYKFNELSLEERNKIINMDKRYGKIICACNKVTEGEIIDAIRRPLGARTLEGIKRRTGAAFGSCQGAYCLNKVVSILARETNKFMTDIVKDSKNSKIIPCRIKEFDTI

SEQ ID NO: 964 - protein, 117 aa, Clostridium botulinum
MLREFICNGCNKKCIISLYNSNYNTIKGNQCNLGIDYAKNYVNNTKDIFTTLVRIKGSKYNVLPVKSSEPIEKSLWIECSKALSRLYVGYPIEIGDVICKNILNTGVDIIAIKNINE

SEQ ID NO: 965 - protein, 426 aa, Clostridium botulinum
MLDLKRIRNNSNEIKEALNNRGEKFDVTVIDEVLKLDEERRNILVKVEVLKSKRNQVSSEVPKLKKEGKDVSNIVAEMKNLSEEIKGFDATLAKIDEKIQYIMLRIPNIPNPQVPDGETDEDNIEIRNWLEPTKFDFEPKAHWDIGTNLNILDFERAGKVTGSRFTFYKGLGARLERAVISYFLDTHTEKHGYTEILPPYMVNRTSMIGTGQLPKFEEDAFKISEDDYFLIPTAEVPVTNLYRDEILKGDELPLKHVAYSACFRSEAGSAGRDTRGLVRQHQFNKVELVKFTKPEQSYEELEKLTNDAETVLKELGIPYRVVRICKGDLGFTAALKYDLEVWMPSYNRYVEISSCSNFEDFQARRANIRYKEDAKAKPQYVHTLNGSGVAIGRTVAAILENYQSEDGSVTIPEVLRPYMGGREVIK

SEQ ID NO: 966 - protein, 295 aa, Clostridium botulinum
MIKYYNRKTNDYDIEKVAGEKYLNWTYSSPIGMNLLEVFIKKKFFSKIYGFYCDRKLSSKKINKFINDFEIDMSLSENQSSKFKCFNDFFTRKLKKEARPIKADKNILISPGDGKILAYKNLNLNSVTEVKGINYSFYELINNDSLAKEYDNGTCLVLRLCPTDYHRFHFIDNGTCENTIKLDGFYYSVNPIALSKIPSLFCKNKREYAIFHSENFGDVIFMEVGATCVGSIIQTYKPNTKILKGDEKGYFKFGGSTVILFFKKNTIKIDNDILNQSKLGYETSVIMGEPIGSKK

SEQ ID NO: 967 - protein, 532 aa, Clostridium botulinum
MYLNSVQRFKEIIKILAFYGFGHIVDSKFNEDKAPENLRKAFEELGPTFIKIGQILSTRPDILSAPYIKELSKLQDSVPEDNFSDINKIFFEEFNISIEDAFLNFNRKPLASASISQVYSAKLHNNEEVIVKIQRPEIKEKMNMDLAILRKIFTLGKIKTFDTLIDPKEAIDELINATNLELDFNNEKENIKKFKYFNKNLKCIYVPNTIDKYCSSKIITMEKIHGFKITDTKSLDKLNYDKKDVAHKLAISILKQIFEDGFFHGDPHPGNIFIYEGKICYIDFGIMGTLSSDLKNYLNKAMVAVAFKDVDKLISVLLSIGIKKGYINKNNLFEDINYLFDIYLSTPLKNIKMSTMLQEVFECANRNNISLPKELTMLIRSLIIIEGILEKIDPNIQILDIAIPYVENNNKVNFFKNIDLDELILNSYKTAEDLSKIPTKTVQLLNSILNGRSKIQLNVNNLDRSINELNKMINRIVFALIISSMIIGFSFILNSNIGPKFYDISIIGILGYLIAAFMGFWLLISIIKSGKL

SEQ ID NO: 968 - protein, 106 aa, Clostridium botulinum
MINEFKNILLAGIGSAAYTYEKASNLVDEMVQKGKITVNEGKELSEELKRTIDENKKSKNSSEEKQLTREDIISIFNELNFVNKNDLNDINNKIKSLEDKISQLEK

SEQ ID NO: 969 - protein, 516 aa, Clostridium botulinum
MKLEIITEDRLGMVLDILNVLYNESMDIKSLEVFPKKIYIKINKKISYNKNMIIKKIKNIKGVVRVKKIDILPYEKDEKKLFTIIDSLEEGVIFVNEKCQVEVFNKYCENLFNTLKENAIRKHIKEIFGQNQLILDALKMGKDYDNLQVFINNKDRKGMYVSTARAIKDDKNKTIGFVILIKDLKETIEIVNSIKYKEDEAFKGIIGKSICIDNLKEICKSVAKTNSTVLICGESGTGKELFAKAIYKLSLRNNKNFVTVNCAGLQDNLIESELFGYEAGSFTGAKSNGKEGFFKLADKGTIFLDEIGELPLNIQCKFLRVLQEGTIRKIGSTKEEKIDVRIIAATNKNLEEMVSNGKFREDLYYRLNVVPIEIPPLRERKEDIQLLVDNFVKALNKSLNKNIRYIDKKFINKLLKYNFPGNIRELQNIIERTMNLCSDNILSDKNLSINTNITLNNDKNNDSGALLLQDIVEKAEKCAIQKVMNEYKSLRKVGKVLGVSHTTVMNKIKKYGIVCK

SEQ ID NO: 970 - protein, 400 aa, Clostridium botulinum
MENIKKMGFATKAIHGGLIGDKQFGSLATPIYQTSTFIFDSAEQGGRRFAGEESGYIYSRLGNPTSTEVENKLALLECGEAAVVAASGMGAIAASLWSALKSGDHVVASDTLYGCTFALLNHGLTRYGVEVTFVDVSNLDEVRNALKANTKVVYLETPANPTLKVTDIKQISNMVHENNKECLVFVDNTFCTPYIQRPLQLGADVVVHSATKYLNGHGDVIAGFAVGKEEFINQVKLFGIKDMTGSVIGPFEAFLIIRGMKTLQLRMEKHCKNAMEVSKFLESHPAVKKVYYPGLESFEYYELAKKQMSLPGAMISFELKGGVEEGKVVMNNVKLATLAVSLGDAETLIQHPASMTHSPYTAEERKEAGISDGLVRLSVGLEDVGDIISDLKQALDLIVK

SEQ ID NO: 971 - protein, 145 aa, Clostridium botulinum
MNDYIEYAIIEAKKALAIGEVPVGAIIVKENKIIAKSHNLKESLKDPTAHAEILAIKEACNTIHNWRLKGCKMYVTLEPCAMCASAIIQSRISELHIGTFDPVGGACGSVVNITNNSYLKNNLNIKWLYDDECSRIITNFFKNIR

SEQ ID NO: 972 - protein, 541 aa, Clostridium botulinum
MGYTALYREWRPRTFKEVVGQKHITVTLKNQVIEKRIAHAYLFCGTRGTGKTSTAKILSKAVNCLNPKDGEPCNECEICNKINSGTLMDVIEMDAASKRKLEDIKEVIENVKYPPQEGKNKVYIMDEVHMLTQEAVNAFLKTLEEPPSNVIFILATTDPQKLPITILSRCQRFDFRRIRNEEIFERLRAIVSEQGIYADDKSLNLIARMSDGAMRDALSILDQVISTGDGKVEYDQVLDMLGLVTNENLLRITNSIIEKDVEKSMRIIEDIVLSGKDIYNFIKDMITHLRNILMVKVSKNPNEILDMSSENIDLVKEQSEKIRIEEIMRDIKILQEAEQQSKWVKQNRIYLELAVLKMCKIEYDTSKEVILSRLNKIEELIKSGNIKLAINEEKKKIEPKEFNLKREKESIQHSKIEKNSLEDYNKDSKLTVETVKKMWRDILEAFKARRLMVLYAALVTANITDCKEGIITLNYNKQYSFNKKRLEKPENNKVVQEIFSEVLKEKIRIIYIVEEKAKEENLPEEILKNTFGENILEIIDE

SEQ ID NO: 973 - protein, 113 aa, Clostridium botulinum
MARGGFPNMGGANMNNLMKQAQKLQQDMEKMQGEMEKKEFSATVGGGAVTAVANGKKQIVDIKIEPEVVDEDDIEMLEDLIMSACNEALKKAEEDTSSEVKRLTGGMNLPGMF

SEQ ID NO: 974 - protein, 198 aa, Clostridium botulinum
MDFYPIAIEKLIEEFAKLPGIGYKTAQRLTLYVLNLPKEEVKEFSEALVKARGTIKYCSVCGNFTDKDPCAICSNPNRNKSIICVIEQPKDIMSMEKIREYNGVYHVLHGNISPMAGRGPEDIKLKELIRRIDGSVNEVIVATNPNVEGEATAMYISKILKPLGVKVTRIAHGVPVGGDLEYADEVTLAKALEGRIEL

SEQ ID NO: 975 - protein, 87 aa, Clostridium botulinum
MGGFFIMKKLNDGKNEKKLLLESIDSVISEINNIRRLFENASDPKLIDYAIYMEEALKAKYIYLLKEAKEEGIKVEYCDTIKEVEVG

SEQ ID NO: 976 - protein, 86 aa, Clostridium botulinum
MGIEYIAYFILAIFLLFVVVKIFSWPLKILLSLIGNAILGTVLLFILNVIGGAFNFYIGINIWTALIAGFFGIPGVIFLIIFKLFL

SEQ ID NO: 977 - protein, 230 aa, Clostridium botulinum
MKITKNILKAEFIKRPNRFQAYVKINEKIEMVHVPNTGRCKEILIPGSTVILREENNENRKTRYDLIAGYKGDMLISIDSQIPNKVVYEALMNFKIEILKEYTNIKREKTFGKSRFDFRLEKENGEVYYLEVKGVTLENDGLTMFPDAPTERGTKHILELIDVKNKGMGAGVLFLIQLNGVKKFTPNYKMDKNFGEALRLAKEKGVDILAYDCLVEESSISLNNPVSIEI

SEQ ID NO: 978 - protein, 162 aa, Clostridium botulinum
MKFKYCPLCGEKLIEKYSWDEGGVPYCKRHNIMYFDTPKPCIVVGVLKEDHVLLLKQSYIFKNSKVLLSGYVSSGETVEEAVHREVKEEAGINIRDLKYLGSDYLESKDIVMITFMATYRDGILNKSEEVEWIDWIPIKEAIDHMEEDEIGKKIIKKIMKNC

SEQ ID NO: 979 - protein, 240 aa, Clostridium botulinum
MSNKIEKTPKRVPEIKGVLRSHMIEVPSIIREASGIKVFGKRIKSFVYSTDVAVIKNTNADAVIAVYPFTPQPIITQSLVLAADIPVFCGVGGGLTTGKRVVNLALDAEFKGAMGVVINNPTPNDVLQQIKDTIDIPIVVTVVSEYEDIEARINSGATILNISGAKKTAYIVREIRKRYPDFPIIATGGPNEASIKETIEAGANAITYTPPPASDIFSEVMDKYRVNFKKEHDREENEQS

SEQ ID NO: 980 - protein, 262 aa, Clostridium botulinum
MNGILFYFSGTGNTKWVADRIGDKLCKLDNTIHKVNIENLDDDVLIKIHNYDFIIIGTPIYAEMGPKLIQDFVNNIPKVKEKIKCILYSTQGGNSGCETESMHKILCNKGYDVVIKVNIKMINNYYFSVGKKPDEAEMANILRDAEKKVDLVVDKFSKGEVYLENISKTRVFLGKIASKGFNKFLPKLSNNLKSTEHCIKCGMCVRNCPKGNIVFENGGVVFHSNCILCLRCIYICPSNAIVYKEKRIDQIEKNIIKLLDIK

SEQ ID NO: 981 - protein, 53 aa, Clostridium botulinum
MNINNDNCSKCINILKSNCNGNLENCICQKCVRNIEKCIITKYCSETESTLSI

SEQ ID NO: 982 - protein, 234 aa, Clostridium botulinum
MENWLQRTEFLIGKEAIEKLNKSKIVVLGVGGVGSFVIEALVRSGVGNITIVDNDTIDITNINRQIHANLNTVGKSKVEVMKERILSINPNCNVKIHEEFINKDNISELVAKDTDYVVDAIDTASSKILSIVWCDKNNINIISSMGTANKLHPTKLRIADIYDTKVCPLAKIMRYELRKRNIKSLKVLYSEETPIKNNNRPLNDKGRPTPASIAFVPPCAGLIIAGEVVRDIIK

SEQ ID NO: 983 - protein, 369 aa, Clostridium botulinum
MILVAVCDSTRGIFIPIFKNEFNINNTKIGLMITISTLGYTVFTYLGGILCQKKGQKRVYSIGLLIISISFLLLNFTPNYIILIILMFLINGGQAFLAISSNTIIPIIFISFQAIIMNLAHFNYGMGLALSQRISGMLLYRGITWRRIYLYLSIITFIVYLLLFFINIPVINKSKDDNKLKSKEIFKDKLLYFYIFALGFYVFSEIATGNWFVNLMENGYRYNKNQSSYYIFLFSALFALGRLLGGFLVEKFNYIKAVCTSLAVALMMYTIGITLGQKGLILISLSGIFFSIVYPTVVLTISKVYSTNSSYVTGIVVTLSSFVNMIISFLMGYLNDLIGIYTSYYLIPISLFISLMFMFLIHKNIKKLA

SEQ ID NO: 984 - protein, 314 aa, Clostridium botulinum
MNNKFKVSIELAKGTVDEYIVKDITGISIGRIFILELSKKNKYGCFRLNLYRDGENSNIYLNYILKDFLQYLFYKKEVCKINIIINENMNTNVFIEYGFYLEGIINDSRLIDGIKTSEFLFGLDIDTFRKANLYKELSIEGKNISLKLLTPINAQELLDYYIRNERHLKSYEPTRDKTFYTLKEQRDLLMDSYKQYLNGNSLELGIYKDKKFIGKIKISNIIMGIFKNCIVGYSIDKDFQGNGYMKEALKLLIDYTFNEIDIHRIEASTLIDNIRSQKVLEGCGFKKLGINEKYLYIDGKWQDHVTYYIVNNNI

SEQ ID NO: 985-1000 - skipped (16 entries)

SEQ ID NO: 1001 - DNA, 1533 bp, Ricinus communis
  source 1..1533: mol_type = unassigned DNA
  misc_difference 350: note = modified_base - a, c, t, g, unknown or other
  misc_difference 351: note = modified_base - a, c, t, g, unknown or other
  misc_difference 365: note = modified_base - a, c, t, g, unknown or other
  misc_difference 366: note = modified_base - a, c, t, g, unknown or other
atggctgcaggattggccattacaagtgaagggggtcagtacaatggcaggatgacctcctttgttgctctatcttgcatgatggctgccatgggaggagtcatttttggctatgatattggagtttcaggtggtgtgacatcaatggatcccttcttgaagaaattctttccggatgtgtacaggaaaatgaaagaagacacagaaattagcaactactgcaagtttgatagtcaacttttaacctccttcacatcctcactatatgttgctggccttgttgcttccttcttcgcctcgtcggtcactagagcttttgggcgcaagccatcaattcttttaggcggtgnngttttccttgccgnngcagcccttggtggtgctgcagttaatgtgtatatgttgatatttggccgcgtcttgcttggagttggtgtcggttttgcaaaccaggcagttccactttatctgtctgaaatggcaccgccaagatatagaggggcaatcaacaacggcttccaatttagtgttggtattggggcattgtctgccaaccttataaactatggaactgaaaagattgaaggtggctggggttggcgaatttccctagcaatggcagcagttccagctgcaatcctgacatttggtgcacttttcctcccagagacacccaatagcctgattcagcgcagcaatgatcatgagagagccaaacttatgttacaacgtgtgcgaggtaccactgatgtccaagcagaacttgacgatctcatcaaagctagcataatctcaagaactattcagcacccatttaagaatataatgcgaagaaagtatcggcctcaactagtaatggcagtagccataccatttttccagcaagtaacagggatcaatgtcattgcattttatgctccaatacttttcaggacaatcggcctggaagaaagtgcatccctcttatcttctattgtgacagggcttgtgggtagtgcgtcaacgttcatatcgatgcttatagtcgataaacttggaagaagagcattgtttatatttgggggtgtacagatgtttgtagcacagataatggttgggagtattatggcagctgagctaggcgatcatggtggtataggtaaagggtatgcttatatagttctgattttgatctgtatttacgtggctggattcgggtggtcatggggtcctcttggatggttggttcctagtgagatattcccattagagattcgatcagcagggcaaagtattgtggtggcagtgagctttttattcactttcgttgttgcacaaacttttctatctatgctttgccacttcaaatctggaattttcttcttttttggaggatgggttgtagtgatgactgcctttgtgcactttttgctgccagagacgaagaaggtgccaattgagaaaatggatatagtgtggagggaccactggttttggaagaaaattataggggaagaagctgctgaggaaaataataaaatggaagcagcatga

SEQ ID NO: 1002 - DNA, 660 bp, Ricinus communis
  source 1..660: mol_type = unassigned DNA
atggctgatgaggtgatacttttggatttctgggcaagtccttttgggatgagagttagaatagcactagcagagaaaggagtaaagtatgagtatagagaagagaatttaaggaacaaaagccctcttcttttggagatgaatccagttcataaaaagattcctgttctcatccataatggaaaacccatttgtgaatcacttattgctgttcaatatattgatgaggtttggcatgatgagtctcctcttttgccttctgattcttacccaagagcacatgctagattctgggctgattttgttgacaagaagatttatgaacttgggaggaagatatggactacaaaaggagaggatcaggaggcgggcaagaaagaattcatcgacgccattaagttgttggaaggtgagcttggagacaagccgtactttggtggtgagagctttgggtatgttgatgttgcacttatcccattctattcctggttttatgcctatgaaacctgtgggaacttcagcatagaggctgagtgtcccaagttcatggcatggattaagaggtgcctgcagaaagagtctgtctccaaggcccttcctgaccagcagaaggtctatgaatttgttttggagctgaagaaggtatttggtattgagtaa

SEQ ID NO: 1003 - DNA, 618 bp, Ricinus communis
  source 1..618: mol_type = unassigned DNA
atggacaaaagcaaagtaagcacagcagttggaggggagactccagtaggattaattacgggttcaagagatgatgagttagaaagtggctccatgcgcacagccgagactgtgctgcggcttgtacccatggctttttgcatctcagctcttgttctcatgctcaagaattctcagactaatgactttggcactctttcctactcagatcttggagctttcaggtatttggtgcatgccaatggcatatgtgctggctattcccttctgtcagctatcattgtagccatgcctcgaccatccaccatgtcccgagcctggacattcttcttccttgaccaggtgttgacatatgtaatcttggcggcagccgccgtgtctgtggaggcgttgtacctggccagaaagggggacattgccatcacctggagtgcagcttgtgtgtcttttggtggattctgccacaaggccataacatctgctgtcatcacatttattgtagtagtctgctatgcactactttcacttgtctcctcctacaagctttttagcagatatggtgcaccagatgtgagctacccaggcaaggggattgaggttgctgcctttcacagttaa

SEQ ID NO: 1004 - DNA, 3102 bp, Ricinus communis
  source 1..3102: mol_type = unassigned DNA
atgggttcaatggtagttcttgttgggagcatgccgtctttggcttccttgattagcttaggaagtttaagtgtggcagcagcgacttctagttcttcagactcatattattcatcctcatattcacttgttcgaagagtttctttatcgaaaaggggtcttaagagtgccaaaagatggcattgcgtttgtaaatgctctgttactaccacagattttattgctgatcaaggcaatgctgtatccattgattctaataattcatttagagcaagcagtaatggtggagatgctgacagtgaaatcttgcttaagcctgctcctaggcctgtcttaaaaccttcattagggtctaaaggtgattcccttttaggtatgagctcttctcagttgaattctggagattctgataatgatgatgaacaagagaggaataaagtaattgagtcgcttggtgaggtgttggagaaggctgaaaagcttgaaacttctaaaccaagtggaccgggtaatcctagcagtagtgggaaagacaatggaaatgtaaataaaataacaccacctaacattggtactaattcacgaattgctaaatctgagagttcaggagccactcgtaaaactaaaactttgaagagcgtgtggcgaaaaggggatactgtgtcctccgtgcaaaaggttgtaaaggaagctcctaaagttattaataagcttgtgaaagaagatactataacaggggaaggcacaaagctagaatctcaatctagttttcctttaagacctgtgcagccacccttgagacctcaaccaaagttacaggcaaagccatctgtagctcctcctcctgtgatgaaaaagcctgttatcttgaaggatgtgggagcagccccaagaccaccagttagtggtgaagctgattcgaaaaataatggacggcagcctattttagttgataaatttgcccgcaaaaaaccagttgtagatcctctaattgctcaggcagttttagcccccacaaaaccaggaaagggcccagcccctggaaaattcaaggaccgaaagaagagtatttcacctggaggaccaaggagacgacttgttaataatgatgaacttgagattcctgatgaggagacatcagaactgaatgtctctattccaggtacagctaggaaagggaggaagtggagtaaagctagccggaaggctgccagactccaggctgccaaagatgcagctcctgtcaaagtagaaattttagaggttggggaaaatggtatgttaattgaggagttagcctacaacttaaccatcagtgaaggtgaaattcttgggtatttgtactcaaaggggattaaacctgatggagtgcagactttggataaggacatggtaaagatgatatgcaaggaacacgatgtggaagtcatagatgttgctccagttagatttgaagaaatggcaaggaaaagagaaattcttgatgaagatgatcttgacaaactagaggacaggcctccagttctaactataatggggcatgtggatcatggcaagacaactctactggattacattcgtaaaagcaaggtgactgcctcagaagctggtggaattacacaaggaattggagcatataaagtcctcacacctgtggatggaaaaatgcaaccttgtgtttttcttgatactcctggacatgaggcatttggtgcaatgagagctcgtggggcaagggtgacagatattgctattattgtggtggcagctgatgatgggatccgtcctcaaacaaatgaggccatagctcatgcaaaagcagctggagttccaattgttgttgctataaacaagatagataaagatggggctaatccagaaagagtcatgcaagatctttcttcaattggtcttatgcctgaagactggggcggtgacatcccaatggttcagattagtgctctcaagggggataacatagatgatttgctagaaactgttatgcttgttgctgagttacaagagttgaaggctaatccgcatagaaatgcaaagggtacagttattgaggcaggtcttgataaatccaaaggtccaatagctacatttattatacagaatggcacacttaaaagaggggatgttgtggtttgcggagaagcctttggaaaggttcgggctttatttgatgatggtggaaaacgagtggatgaagctggaccatctattcctgtacaggttattggattgagtaacgtaccaaaagctggcgatgaatttgaggctgttgcctctcttgatattgcacgtgaaaaggcggaagcacgtgctgaattattgcgaaatgagcgaataacagccaaggctggagatggcaagattacactatcttccttagcatcagctgtttcatcaggaaggctgtctggaatagacttgcaccaactgaatattatattaaaagttgatgttcagggatctgttgaagctgtccgacaagccttacaggtgctccctcaagataatgtcaccttgaagttcctcttacaagcaacaggggatgtaagctcaagtgatgttgatcttgccattgccagtgaagctattattttaggatttaatgtcaaagcaccgggttctgtcaagagcaatgcagaaaacaaaggtgttgagattcggctatatagagttatatatgatcttattgatgatgtacgaaatgcaatggaaggacttctagagcctgttgaggaacaagaaacaattgggtcagcagtagttcgggctgtatttagcagtggaagcggccgtgttgctggatgcatggtaacagatgggaaagtagtgaaaggctgtggtgttaaggttattcgaaagcgaaagacaatccatgttggcgttctcgattccttgagacgagtaaaggaacttgtaaaagaggtaagtgctgggctagagtgtggtattgcaatggaagattatgatgattgggaggaaggagatactattgaagccttcaatacagtcgagaagaagcggacccttgaagaggcatcggcttcgatggcagctgcactggaacatgcaggtattaatgtgtag

SEQ ID NO: 1005 - DNA, 3498 bp, Ricinus communis
  source 1..3498: mol_type = unassigned DNA
atggcagatccagatccttattcttcttcttctacttctgatattccacataacgatgtgtcttggaactcaaatcaaatcttggaatcagttgatacccaaatgctaattgacccagttgccaataatgggattgatgcaggacgttcggtgctgggtttttctttaacatcacctgatcttgttatttgtgctggttcgtgtggagattcacctgaattctttaatagaacgacaaagaactactcttttgagctctcgttggagaatggtatcaacggtactaataccaaagatacccagaagattcagtctgtaaagttttctccaatttgtcaaacattcaacaaacaattgtctcctgaatcttccttagaagagcttgttgcagaaccttcaagaatgagaaatgatgataatttgctaaaagatcctttaattggtgtaagcattaatgtaggatctaccaatgaaggtgtggtcttgaatggtgtgcagtttttggaggacacttgttacaccggcggtgatactgtgaagactaatgctacaattggagatttagatagagaagaagatggtctttctttgtaccaaacggctcgttttggtaacttctcgtattgcattcctgcaatggaaccagggaattatgttgttaccttgcatcttgctgaaattgtattcactgatgggcctcctggaaggagagtgtttgatgtttttatacaagagaagaaggttgtttcttccctagatatatatgctcaagtaggtgcaaataagcctctagttatatctcaacttaagacttgtgtcgatggagaggagggcttaaccattaggtttcaaggagttattggaagtcccattgtatgtggcatttctataaccgaagattcttctgctcatgctggtgaagctcaattttcaaaacaaatgggaatgtcccaagtggcagaatgcaacttactgaaacaatataatagtgagcaagagccggatggagatcatcagaagctagaaagacacgttgagtttcaggaaaaggaactgacggaaatgaggagggcattggaggagcttaagagggaaaaccaacttaagaatagggaatgccaagacgcttggaactctttacatgaactccagaatgagcttatgcgcaagtctatgcatgttgggtcattggcatttgccattgaaggacaagttaaagagaagagcaagtggttctcatctttgagggacatgactagaaaattgaagattatgaggatagagcacttaaagatatcagaggaggcactggcatataagaaatgcctcagagatatggaggaaatgaggtccactattcagtctacaatgaagcagcaagtagatttgcacgaggacctcaagattaaatttattgaaggggagaagaaaagaaaggaactctacaacagggttttagagttgaaaggaaacataaaggtgttttgcagatgtaggcccttaaatgctgaggaagtagcatcaggggattctatggctattgattttgaatctgctaaagacggtgagctcacagtaatatcaaatggacttcccagaaaaaccttcaagtttgatgctgtttttagccctgaggcagaccaagctgatgtttttggagacactgcgccatttgcaacttcagttttggatgggtacaatgtatgcatatttgcttatggacaaactggaactggaaaaacctttaccatggagggctccgaagaagctcgtggagtaaactttaggactcttgaggagatatttcgcataatcaaggagcgctataagctttttcggtatgatatctttgtgagtgttctagaagtctataatgagcaaatacgagatttgttgggctcaggctctcagccaggagtggccacaaagaggcttgaaataaggcaagcgggtgaagggctgcatcatgttccagggttggttgaagcacaagtaaacaacataagtgaggcctgggaagttctacaaactggaagtaacgcaagggcaattggctcaaccaatgccaatgagcacagcagccgatcccattgcatacactgtgtgatggtgaaaggagagaatttattgaatggagaatgtacaaagagcaagttatggttggttgatctagcaggaagtgagcgagtagcgaagacagaagttcaaggagatagacttaaggaaacacaaaatattaacagatccttgtctgcacttggtgatgtcatatctgcccttgcaactaaaagtcctcatatcccattcaggaattccaagctcactcacctgcttcaagattccctaggaggagattcaaagaccctcatgtttgtccagataagtcccagtgagaatgacctgggtgagaccgtatgctctctgaattttgcaagcagagttagagggatagagttgggtcctgcaagacggcaattggacaatactgaacttcagagatacaaacagatggctgaaaaatcaaaacaagacatgaagagcaaagatatacagatcaagaagatggaggaaacaatcaatggcttggtcttgaggataaaagaaaaagaccttagaaataagaatctgcaagagaagttgaaggagctggagtcgcaacttctcattgaaagaaagctagcacgtcagcatgttgacacaaagatagctgagcaacagcaacaacaacaaatgaaacaacagcaggatgagcagagtagtgccccaccaaggccaccacttgcaaatcgactattaggaagtaacaagaatttcagtgaagccgcaagtactgcaacaaccaaagagcaagtaaattcctggcaaccacttgtggaaaataacagttataggcctacactttgcattcttccaacagatggcatggtcaagtatattgatcccacagaaaaagaaaacaaccctggcatggctgaacatccacgattgccgaagaggaccggcagagcttcaatttgcacaacagcacaacggataccagtagctccagcaccaaggcgcacatcgatgattccactcccaagtgtaccaggtttagcacatctaccttcaccattagcaccattgtcgttatgcgagattgacataaaggaagaagacacaggagggtctgaaattaattgcttgccagagcaaacacattgcaacagtcccaaaggaataaaacatgggactagaaagctaagcaccatactaagacaaagccttcaaaagaaaatgcagctgaattctccaatgcagcaacacctgagaaaacgaggtataaatgttgggatggagaaagtcagggtctctattggaagtcgagggaggatggcacacagagttttgctaggcaatggtagaagaacaggaataaaggatacccagcagaacaggagtcatagagaaaaagagagaggatggaatattggaacagcgggaagaactgcaatctaa

SEQ ID NO: 1006 - DNA, 3495 bp, Ricinus communis
  source 1..3495: mol_type = unassigned DNA
atggcagatccagatccttattcttcttcttctacttctgatattccacataacgatgtgtcttggaactcaaatcaaatcttggaatcagttgatacccaaatgctaattgacccagttgccaataatgggattgatggacgttcggtgctgggtttttctttaacatcacctgatcttgttatttgtgctggttcgtgtggagattcacctgaattctttaatagaacgacaaagaactactcttttgagctctcgttggagaatggtatcaacggtactaataccaaagatacccagaagattcagtctgtaaagttttctccaatttgtcaaacattcaacaaacaattgtctcctgaatcttccttagaagagcttgttgcagaaccttcaagaatgagaaatgatgataatttgctaaaagatcctttaattggtgtaagcattaatgtaggatctaccaatgaaggtgtggtcttgaatggtgtgcagtttttggaggacacttgttacaccggcggtgatactgtgaagactaatgctacaattggagatttagatagagaagaagatggtctttctttgtaccaaacggctcgttttggtaacttctcgtattgcattcctgcaatggaaccagggaattatgttgttaccttgcatcttgctgaaattgtattcactgatgggcctcctggaaggagagtgtttgatgtttttatacaagagaagaaggttgtttcttccctagatatatatgctcaagtaggtgcaaataagcctctagttatatctcaacttaagacttgtgtcgatggagaggagggcttaaccattaggtttcaaggagttattggaagtcccattgtatgtggcatttctataaccgaagattcttctgctcatgctggtgaagctcaattttcaaaacaaatgggaatgtcccaagtggcagaatgcaacttactgaaacaatataatagtgagcaagagccggatggagatcatcagaagctagaaagacacgttgagtttcaggaaaaggaactgacggaaatgaggagggcattggaggagcttaagagggaaaaccaacttaagaatagggaatgccaagacgcttggaactctttacatgaactccagaatgagcttatgcgcaagtctatgcatgttgggtcattggcatttgccattgaaggacaagttaaagagaagagcaagtggttctcatctttgagggacatgactagaaaattgaagattatgaggatagagcacttaaagatatcagaggaggcactggcatataagaaatgcctcagagatatggaggaaatgaggtccactattcagtctacaatgaagcagcaagtagatttgcacgaggacctcaagattaaatttattgaaggggagaagaaaagaaaggaactctacaacagggttttagagttgaaaggaaacataaaggtgttttgcagatgtaggcccttaaatgctgaggaagtagcatcaggggattctatggctattgattttgaatctgctaaagacggtgagctcacagtaatatcaaatggacttcccagaaaaaccttcaagtttgatgctgtttttagccctgaggcagaccaagctgatgtttttggagacactgcgccatttgcaacttcagttttggatgggtacaatgtatgcatatttgcttatggacaaactggaactggaaaaacctttaccatggagggctccgaagaagctcgtggagtaaactttaggactcttgaggagatatttcgcataatcaaggagcgctataagctttttcggtatgatatctttgtgagtgttctagaagtctataatgagcaaatacgagatttgttgggctcaggctctcagccaggagtggccacaaagaggcttgaaataaggcaagcgggtgaagggctgcatcatgttccagggttggttgaagcacaagtaaacaacataagtgaggcctgggaagttctacaaactggaagtaacgcaagggcaattggctcaaccaatgccaatgagcacagcagccgatcccattgcatacactgtgtgatggtgaaaggagagaatttattgaatggagaatgtacaaagagcaagttatggttggttgatctagcaggaagtgagcgagtagcgaagacagaagttcaaggagatagacttaaggaaacacaaaatattaacagatccttgtctgcacttggtgatgtcatatctgcccttgcaactaaaagtcctcatatcccattcaggaattccaagctcactcacctgcttcaagattccctaggaggagattcaaagaccctcatgtttgtccagataagtcccagtgagaatgacctgggtgagaccgtatgctctctgaattttgcaagcagagttagagggatagagttgggtcctgcaagacggcaattggacaatactgaacttcagagatacaaacagatggctgaaaaatcaaaacaagacatgaagagcaaagatatacagatcaagaagatggaggaaacaatcaatggcttggtcttgaggataaaagaaaaagaccttagaaataagaatctgcaagagaagttgaaggagctggagtcgcaacttctcattgaaagaaagctagcacgtcagcatgttgacacaaagatagctgagcaacagcaacaacaacaaatgaaacaacagcaggatgagcagagtagtgccccaccaaggccaccacttgcaaatcgactattaggaagtaacaagaatttcagtgaagccgcaagtactgcaacaaccaaagagcaagtaaattcctggcaaccacttgtggaaaataacagttataggcctacactttgcattcttccaacagatggcatggtcaagtatattgatcccacagaaaaagaaaacaaccctggcatggctgaacatccacgattgccgaagaggaccggcagagcttcaatttgcacaacagcacaacggataccagtagctccagcaccaaggcgcacatcgatgattccactcccaagtgtaccaggtttagcacatctaccttcaccattagcaccattgtcgttatgcgagattgacataaaggaagaagacacaggagggtctgaaattaattgcttgccagagcaaacacattgcaacagtcccaaaggaataaaacatgggactagaaagctaagcaccatactaagacaaagccttcaaaagaaaatgcagctgaattctccaatgcagcaacacctgagaaaacgaggtataaatgttgggatggagaaagtcagggtctctattggaagtcgagggaggatggcacacagagttttgctaggcaatggtagaagaacaggaataaaggatacccagcagaacaggagtcatagagaaaaagagagaggatggaatattggaacagcgggaagaactgcaatctaa

SEQ ID NO: 1007 - DNA, 1285 bp, Ricinus communis
  source 1..1285: mol_type = unassigned DNA
atggaggaatcaaaattggagaaaaagaatgtaccggttttgccatggatgagatgtccagttgacattaaacaatttgaagaatgctctcttgatcttgttccttgccttgaccctaggttaaaggtggctttagagaatatgggtttcacatcattatttgcagttcaagttgctgtttggcaagaaacaataggacctggtaattttgaaagagacctttgtataaatgcaccaacaggaagtggtaaaactctagcttatgctttaccaattattcaaatgctatcaacccgctctatcaagtgcctacgcgctttgattgtgttgcctacacgagatttagcattgcaggttaaacaagtatttgctgcacttgcacctgcagtgggattatctgttggtttggctgttggtcaatcttcaattgctggtgaaatttctgagcttattaaaagacctaagcttgaggctggcatttgttatgatcgagatgatttgaaaggggttttaagggaaaatcttaccctcgacttgcaaagatggttttatctgccacattaacccaagatccaagcaagcttgttcaacttgatctgcatcaccctttgttcctgacaaccgggcaaagtcgttatcagctacctgaaaagttggaatcctacagagtgatttgcgagccaaagttaaaacctttatacttggttgcccttctacaaaatttagtaggggagaagtgtattgtttttgcatcatccgtggagtcaactcatcggctttgcacattattaaaattttttggtgatttgaaagtgaagatcaaagagtattcaggtcttcaacatcaatctgtaagaagcaagaccctgaaggcattccgggaaggaaagatacaagtacttgtttcctcagatgcaatgactcgtggaatggatgttgaaggggtgagaaatgtcattaactatgataagcctgcatacataaagacgtacatacatcgggctggtcggacagcaagagcaggccaggttgggcgttgtttcacattattgcataaagaagaggtaaggcatttcaggaaacttttacagaaggccgacaatgattcctttccggtttattctcttcctccagttacattgagcctctttaccctacttatgagtcagcattggagaaattgaaagagaaagttcagtcagaaacatccaggaagcgcagaactggtttcaaatttcagggccaggtgaaggagaggcgaaaagaaaaacaatcaaactcatga

SEQ ID NO: 1008-1050 - skipped (43 entries)

SEQ ID NO: 1051 - protein, 510 aa, Ricinus communis
  VARIANT 117: note = MOD_RES - Any amino acid
  VARIANT 122: note = MOD_RES - Any amino acid
MAAGLAITSEGGQYNGRMTSFVALSCMMAAMGGVIFGYDIGVSGGVTSMDPFLKKFFPDVYRKMKEDTEISNYCKFDSQLLTSFTSSLYVAGLVASFFASSVTRAFGRKPSILLGGXVFLAXAALGGAAVNVYMLIFGRVLLGVGVGFANQAVPLYLSEMAPPRYRGAINNGFQFSVGIGALSANLINYGTEKIEGGWGWRISLAMAAVPAAILTFGALFLPETPNSLIQRSNDHERAKLMLQRVRGTTDVQAELDDLIKASIISRTIQHPFKNIMRRKYRPQLVMAVAIPFFQQVTGINVIAFYAPILFRTIGLEESASLLSSIVTGLVGSASTFISMLIVDKLGRRALFIFGGVQMFVAQIMVGSIMAAELGDHGGIGKGYAYIVLILICIYVAGFGWSWGPLGWLVPSEIFPLEIRSAGQSIVVAVSFLFTFVVAQTFLSMLCHFKSGIFFFFGGWVVVMTAFVHFLLPETKKVPIEKMDIVWRDHWFWKKIIGEEAAEENNKMEAA

SEQ ID NO: 1052 - protein, 219 aa, Ricinus communis
MADEVILLDFWASPFGMRVRIALAEKGVKYEYREENLRNKSPLLLEMNPVHKKIPVLIHNGKPICESLIAVQYIDEVWHDESPLLPSDSYPRAHARFWADFVDKKIYELGRKIWTTKGEDQEAGKKEFIDAIKLLEGELGDKPYFGGESFGYVDVALIPFYSWFYAYETCGNFSIEAECPKFMAWIKRCLQKESVSKALPDQQKVYEFVLELKKVFGIE

SEQ ID NO: 1053 - protein, 205 aa, Ricinus communis
MDKSKVSTAVGGETPVGLITGSRDDELESGSMRTAETVLRLVPMAFCISALVLMLKNSQTNDFGTLSYSDLGAFRYLVHANGICAGYSLLSAIIVAMPRPSTMSRAWTFFFLDQVLTYVILAAAAVSVEALYLARKGDIAITWSAACVSFGGFCHKAITSAVITFIVVVCYALLSLVSSYKLFSRYGAPDVSYPGKGIEVAAFHS

SEQ ID NO: 1054 - protein, 1033 aa, Ricinus communis
MGSMVVLVGSMPSLASLISLGSLSVAAATSSSSDSYYSSSYSLVRRVSLSKRGLKSAKRWHCVCKCSVTTTDFIADQGNAVSIDSNNSFRASSNGGDADSEILLKPAPRPVLKPSLGSKGDSLLGMSSSQLNSGDSDNDDEQERNKVIESLGEVLEKAEKLETSKPSGPGNPSSSGKDNGNVNKITPPNIGTNSRIAKSESSGATRKTKTLKSVWRKGDTVSSVQKVVKEAPKVINKLVKEDTITGEGTKLESQSSFPLRPVQPPLRPQPKLQAKPSVAPPPVMKKPVILKDVGAAPRPPVSGEADSKNNGRQPILVDKFARKKPVVDPLIAQAVLAPTKPGKGPAPGKFKDRKKSISPGGPRRRLVNNDELEIPDEETSELNVSIPGTARKGRKWSKASRKAARLQAAKDAAPVKVEILEVGENGMLIEELAYNLTISEGEILGYLYSKGIKPDGVQTLDKDMVKMICKEHDVEVIDVAPVRFEEMARKREILDEDDLDKLEDRPPVLTIMGHVDHGKTTLLDYIRKSKVTASEAGGITQGIGAYKVLTPVDGKMQPCVFLDTPGHEAFGAMRARGARVTDIAIIVVAADDGIRPQTNEAIAHAKAAGVPIVVAINKIDKDGANPERVMQDLSSIGLMPEDWGGDIPMVQISALKGDNIDDLLETVMLVAELQELKANPHRNAKGTVIEAGLDKSKGPIATFIIQNGTLKRGDVVVCGEAFGKVRALFDDGGKRVDEAGPSIPVQVIGLSNVPKAGDEFEAVASLDIAREKAEARAELLRNERITAKAGDGKITLSSLASAVSSGRLSGIDLHQLNIILKVDVQGSVEAVRQALQVLPQDNVTLKFLLQATGDVSSSDVDLAIASEAIILGFNVKAPGSVKSNAENKGVEIRLYRVIYDLIDDVRNAMEGLLEPVEEQETIGSAVVRAVFSSGSGRVAGCMVTDGKVVKGCGVKVIRKRKTIHVGVLDSLRRVKELVKEVSAGLECGIAMEDYDDWEEGDTIEAFNTVEKKRTLEEASASMAAALEHAGINV

SEQ ID NO: 1055 - protein, 1165 aa, Ricinus communis
MADPDPYSSSSTSDIPHNDVSWNSNQILESVDTQMLIDPVANNGIDAGRSVLGFSLTSPDLVICAGSCGDSPEFFNRTTKNYSFELSLENGINGTNTKDTQKIQSVKFSPICQTFNKQLSPESSLEELVAEPSRMRNDDNLLKDPLIGVSINVGSTNEGVVLNGVQFLEDTCYTGGDTVKTNATIGDLDREEDGLSLYQTARFGNFSYCIPAMEPGNYVVTLHLAEIVFTDGPPGRRVFDVFIQEKKVVSSLDIYAQVGANKPLVISQLKTCVDGEEGLTIRFQGVIGSPIVCGISITEDSSAHAGEAQFSKQMGMSQVAECNLLKQYNSEQEPDGDHQKLERHVEFQEKELTEMRRALEELKRENQLKNRECQDAWNSLHELQNELMRKSMHVGSLAFAIEGQVKEKSKWFSSLRDMTRKLKIMRIEHLKISEEALAYKKCLRDMEEMRSTIQSTMKQQVDLHEDLKIKFIEGEKKRKELYNRVLELKGNIKVFCRCRPLNAEEVASGDSMAIDFESAKDGELTVISNGLPRKTFKFDAVFSPEADQADVFGDTAPFATSVLDGYNVCIFAYGQTGTGKTFTMEGSEEARGVNFRTLEEIFRIIKERYKLFRYDIFVSVLEVYNEQIRDLLGSGSQPGVATKRLEIRQAGEGLHHVPGLVEAQVNNISEAWEVLQTGSNARAIGSTNANEHSSRSHCIHCVMVKGENLLNGECTKSKLWLVDLAGSERVAKTEVQGDRLKETQNINRSLSALGDVISALATKSPHIPFRNSKLTHLLQDSLGGDSKTLMFVQISPSENDLGETVCSLNFASRVRGIELGPARRQLDNTELQRYKQMAEKSKQDMKSKDIQIKKMEETINGLVLRIKEKDLRNKNLQEKLKELESQLLIERKLARQHVDTKIAEQQQQQQMKQQQDEQSSAPPRPPLANRLLGSNKNFSEAASTATTKEQVNSWQPLVENNSYRPTLCILPTDGMVKYIDPTEKENNPGMAEHPRLPKRTGRASICTTAQRIPVAPAPRRTSMIPLPSVPGLAHLPSPLAPLSLCEIDIKEEDTGGSEINCLPEQTHCNSPKGIKHGTRKLSTILRQSLQKKMQLNSPMQQHLRKRGINVGMEKVRVSIGSRGRMAHRVLLGNGRRTGIKDTQQNRSHREKERGWNIGTAGRTAI

SEQ ID NO: 1056 - protein, 1164 aa, Ricinus communis
MADPDPYSSSSTSDIPHNDVSWNSNQILESVDTQMLIDPVANNGIDGRSVLGFSLTSPDLVICAGSCGDSPEFFNRTTKNYSFELSLENGINGTNTKDTQKIQSVKFSPICQTFNKQLSPESSLEELVAEPSRMRNDDNLLKDPLIGVSINVGSTNEGVVLNGVQFLEDTCYTGGDTVKTNATIGDLDREEDGLSLYQTARFGNFSYCIPAMEPGNYVVTLHLAEIVFTDGPPGRRVFDVFIQEKKVVSSLDIYAQVGANKPLVISQLKTCVDGEEGLTIRFQGVIGSPIVCGISITEDSSAHAGEAQFSKQMGMSQVAECNLLKQYNSEQEPDGDHQKLERHVEFQEKELTEMRRALEELKRENQLKNRECQDAWNSLHELQNELMRKSMHVGSLAFAIEGQVKEKSKWFSSLRDMTRKLKIMRIEHLKISEEALAYKKCLRDMEEMRSTIQSTMKQQVDLHEDLKIKFIEGEKKRKELYNRVLELKGNIKVFCRCRPLNAEEVASGDSMAIDFESAKDGELTVISNGLPRKTFKFDAVFSPEADQADVFGDTAPFATSVLDGYNVCIFAYGQTGTGKTFTMEGSEEARGVNFRTLEEIFRIIKERYKLFRYDIFVSVLEVYNEQIRDLLGSGSQPGVATKRLEIRQAGEGLHHVPGLVEAQVNNISEAWEVLQTGSNARAIGSTNANEHSSRSHCIHCVMVKGENLLNGECTKSKLWLVDLAGSERVAKTEVQGDRLKETQNINRSLSALGDVISALATKSPHIPFRNSKLTHLLQDSLGGDSKTLMFVQISPSENDLGETVCSLNFASRVRGIELGPARRQLDNTELQRYKQMAEKSKQDMKSKDIQIKKMEETINGLVLRIKEKDLRNKNLQEKLKELESQLLIERKLARQHVDTKIAEQQQQQQMKQQQDEQSSAPPRPPLANRLLGSNKNFSEAASTATTKEQVNSWQPLVENNSYRPTLCILPTDGMVKYIDPTEKENNPGMAEHPRLPKRTGRASICTTAQRIPVAPAPRRTSMIPLPSVPGLAHLPSPLAPLSLCEIDIKEEDTGGSEINCLPEQTHCNSPKGIKHGTRKLSTILRQSLQKKMQLNSPMQQHLRKRGINVGMEKVRVSIGSRGRMAHRVLLGNGRRTGIKDTQQNRSHREKERGWNIGTAGRTAI

SEQ ID NO: 1057 - protein, 465 aa, Ricinus communis
  VARIANT 415: note = MOD_RES - Any amino acid
MEESKLEKKNVPVLPWMRCPVDIKQFEECSLDLVPCLDPRLKVALENMGFTSLFAVQVAVWQETIGPGNFERDLCINAPTGSGKTLAYALPIIQMLSTRSIKCLRALIVLPTRDLALQVKQVFAALAPAVGLSVGLAVGQSSIAGEISELIKRPKLEAGICYDRDDLMQELQTSVDILVATPGRLMDHITNTKGFTLEHLCYLVERGFKGKSYPRLAKMVLSATLTQDPSKLVQLDLHHPLFLTTGQSRYQLPEKLESYRVICEPKLKPLYLVALLQNLVGEKCIVFASSVESTHRLCTLLKFFGDLKVKIKEYSGLQHQSVRSKTLKAFREGKIQVLVSSDAMTRGMDVEGVRNVINYDKPAYIKTYIHRAGRTARAGQVGRCFTLLHKEEVRHFRKLLQKADNDSFPVYSLPXSYIEPLYPTYESALEKLKEKVQSETSRKRRTGFKFQGQVKERRKEKQSNS

SEQ ID NO: 1058-1100 - skipped (43 entries)

SEQ ID NO: 1101 - DNA, 429 bp, Bacillus anthracis
  source 1..429: mol_type = unassigned DNA
atgttaaaaaaattatcagtatttcttattggtactttgctattgtttggtttagcagcctgtgatagcatcaaatcggtggctagcgatgttacagtaggaaaagtaattgaagaatttaaggctgcaggacttgaagcagaacagcctagtgatctaccggaaaaagaatttgggaatactagaaaagatgcgaaacgcattcttgtaccagcactaggagaagatagtggtggtagaatatttgagtttaaaaacaaacaagatcttgaacaagcgaaaaagtactatgacgatttaggtaacggtaatcaaatgttattctctcatacttacgcaaaaggtaattttcttttacaaatgaatggtgacatggaagatgcccaatttaacaaatataaagaagtaatggacaaaataattaagtaa

SEQ ID NO: 1102 - DNA, 210 bp, Bacillus anthracis
  source 1..210: mol_type = unassigned DNA
gtgtatatcataattaatttcgagccattaagtccagttatgaatgacatagcaatcaagcttgccatggtactatttataccgttattcctagcattaattgtcaaagttatacttatgaaatttatgaaagagtcgattgctggcagaattgcaagtctatctctcttatttttcatgtactatgtatttatatttgttacagggtaa

SEQ ID NO: 1103 - DNA, 639 bp, Bacillus anthracis
  source 1..639: mol_type = unassigned DNA
atggaagtgttgatatttgaattaattctcattgcggttctgattccgttgaatagtgttgtgaaaaaacatgtaccgaaatggaaaggaaaagccggagagaaactggtgaaacgtatgctaagtaaattagatccaaaaagttactatgtattacataatgtgacggtttatacggagtacggtgatacaacacaaattgaccatattgttattgctgaaacaggtgtatttgttgtggagacgaagaactatgagggctggatctatggaagtgagaaagcggcaaggtggacacagggtatttttagaaagaaatcctcttttcaaaatccatttcaccaaaactataaacatataaaagccattgaatggttaatagaacaacagctgccgtgtatctctatggcagcatttcatccaaaatgcagtctaaaaagagtaaatgttcattctaaagagaaacatgtcctgtattataacgatctacaaaaatgtattgaatcatatactgatgtgcaactaacaaatgatgaggtccagcatatctatcacacaatattacgagcgaatattatggataaggatattgaaaagaaacatgtgaagtatttacacaataagttcgctaagcaataa

SEQ ID NO: 1104-1150 - skipped (47 entries)

SEQ ID NO: 1151 - protein, 142 aa, Bacillus anthracis
MLKKLSVFLIGTLLLFGLAACDSIKSVASDVTVGKVIEEFKAAGLEAEQPSDLPEKEFGNTRKDAKRILVPALGEDSGGRIFEFKNKQDLEQAKKYYDDLGNGNQMLFSHTYAKGNFLLQMNGDMEDAQFNKYKEVMDKIIK

SEQ ID NO: 1152 - protein, 69 aa, Bacillus anthracis
MYIIINFEPLSPVMNDIAIKLAMVLFIPLFLALIVKVILMKFMKESIAGRIASLSLLFFMYYVFIFVTG

SEQ ID NO: 1153 - protein, 212 aa, Bacillus anthracis
MEVLIFELILIAVLIPLNSVVKKHVPKWKGKAGEKLVKRMLSKLDPKSYYVLHNVTVYTEYGDTTQIDHIVIAETGVFVVETKNYEGWIYGSEKAARWTQGIFRKKSSFQNPFHQNYKHIKAIEWLIEQQLPCISMAAFHPKCSLKRVNVHSKEKHVLYYNDLQKCIESYTDVQLTNDEVQHIYHTILRANIMDKDIEKKHVKYLHNKFAKQ

SEQ ID NO: 1154 - protein, 9 aa, synthetic construct
  source 1..9: note = Description of Artificial Sequence: Synthetic peptide
RRRRRRRRR

What is claimed:

1. An enucleated cell, comprising:
(a) an oncolytic virus comprising a viral genome that encodes a cancer antigen; and
(b) one or more organelles for release of the oncolytic virus from the enucleated cell.

2. The enucleated cell of claim 1, wherein the caner antigen comprises a tumor antigen.

3. The enucleated cell of claim 1, wherein the oncolytic virus comprises a herpes simplex virus, an adenovirus, an adeno-associated virus, a human papillomavirus, a hepatitis virus, a vaccinia virus, a vesicular stomatitis virus, a poliovirus, a reovirus, a senecavirus, an echo virus, or a Semliki Forest virus.

4. The enucleated cell of claim 3, wherein the oncolytic virus is a herpes simplex virus.

5. The enucleated cell of claim 1, further comprising an immune-modulator.

6. The enucleated cell of claim 5, wherein the immune-modulator comprises a cytokine, a major histocompatibility complex (MHC) class II epitope peptide, a damage-associated molecular pattern (DAMP) molecule, a pathogen-associated molecular pattern (PAMP) molecule, a Toll-like receptor (TLR) agonist, a stimulator of interferon genes (STING) agonist, a retinoic acid-inducible gene I (RIG-I) agonist, or an adjuvant.

7. The enucleated cell of claim 1, wherein the enucleated cell is an enucleated mesenchymal stromal cell or an enucleated mesenchymal stem cell.

8. The enucleated cell of claim 1, wherein the one or more intracellular organelles comprises a endoplasmic reticulum or a Golgi apparatus.

9. The enucleated cell of claim 1, further comprising a homing receptor specific to a cancer cell.

10. The enucleated cell of claim 1, wherein the enucleated cell is not a red blood cell or a platelet.

11. A method of treating a cancer in a subject, the method comprising:
administering an enucleated cell to the subject, wherein the enucleated cell comprises (i) an oncolytic virus, (ii) a cancer antigen, and (iii) one or more organelles, wherein the one or more organelles releases the oncolytic virus, the cancer antigen, or a combination thereof from the enucleated cell in vivo, thereby delivering the oncolytic virus to a cancer cell of the subject to induce death of the cancer cell.

12. The method of claim 11, wherein the caner antigen comprises a tumor antigen.

13. The method of claim 11, wherein the oncolytic virus comprises a viral genome that encodes the cancer antigen.

14. The method of claim 11, wherein the cancer is lung cancer or cancer in lung tissue.

15. The method of claim 11, wherein the oncolytic virus comprises a herpes simplex virus, an adenovirus, an adeno-associated virus, a human papillomavirus, a hepatitis virus, a vaccinia virus, a vesicular stomatitis virus, a poliovirus, a reovirus, a senecavirus, an echo virus, or a Semliki Forest virus.

16. The method of claim 15, wherein the oncolytic virus is a herpes simplex virus.

17. The method of claim 11, wherein the one or more intracellular organelles comprises a endoplasmic reticulum or a Golgi apparatus.

18. The method of claim 11, wherein the enucleated cell further comprises a homing receptor, wherein the homing receptor guides the enucleated cell to the cancer cell of the subject in vivo.

19. The method of claim 11, wherein the enucleated cell is not a red blood cell or a platelet.

20. The method of claim 11, further comprising administering an immune-modulator.
